(19) United States
(12) Patent Application Publication
(10) Pub. No.: US 2018/0311343 A1
(43) Pub. Date: Nov. 1, 2018

(54) MESSENGER RIBONUCLEIC ACIDS FOR ENHANCING IMMUNE RESPONSES AND METHODS OF USE THEREOF

(71) Applicant: ModernaTX, Inc., Cambridge, MA (US)

(72) Inventors: Eric Yi-Chun HUANG, Boston, MA (US); Sze-Wah TSE, Cambridge, MA (US); Jared IACOVELLI, Waltham, MA (US); Kristine MCKINNEY, Cambridge, MA (US); Kristen HOPSON, Arlington, MA (US)

(21) Appl. No.: 15/995,519

(22) Filed: Jun. 1, 2018

Related U.S. Application Data
(63) Continuation of application No. PCT/US2017/058585, filed on Oct. 26, 2017.
(60) Provisional application No. 62/558,206, filed on Sep. 13, 2017.
(60) Provisional application No. 62/490,522, filed on Apr. 26, 2017.
(60) Provisional application No. 62/467,034, filed on Mar. 3, 2017.
(60) Provisional application No. 62/412,933, filed on Oct. 26, 2016.

(51) Int. Cl. A61K 39/39; A61P 35/00; A61K 39/00; A61K 9/51; C07K 14/47; A61K 39/12; C12N 7/00; A61K 39/02

(52) U.S. Cl. CPC A61K 39/39; A61K 2039/572; A61K 39/0011; A61K 9/5123; C07K 14/4705; A61K 39/12; C12N 7/00; A61K 39/02; A61K 39/001164; A61K 2039/545; A61K 2039/53; C12N 2710/20071; C12N 2710/20034; A61K 2039/575; A61K 2039/70; A61P 35/00

(57) ABSTRACT

The disclosure features isolated mRNAs encoding a polypeptide that enhances immune responses to an antigen(s) of interest, such as polypeptides that activate Type I interferon pathway signaling or NFkB signaling, including mRNAs comprising one or more modified nucleobase. The disclosure also features methods of using the same, for example, for enhancing immune responses when administered with an antigen(s) of interest, such as to stimulate anti-cancer immune responses or anti-pathogen immune responses.

### RELATED APPLICATIONS

[0001] This application is a continuation of International Application No. PCT/US2017/058585, filed Oct. 26, 2017, which claims the benefit of U.S. Provisional Patent Application Ser. No. 62/412,933 filed on Oct. 26, 2016; U.S. Provisional Patent Application Ser. No. 62/467,034 filed on Mar. 3, 2017; U.S. Provisional Patent Application Ser. No. 62/490,522 filed on Apr. 26, 2017; and U.S. Provisional Patent Application Ser. No. 62/558,206 filed on Sep. 13, 2017. The entire contents of the above-referenced applications are incorporated herein by this reference.

### STATEMENT REGARDING SEQUENCE LISTING

[0002] The Sequence Listing associated with this application has been submitted electronically in ASCII format, and is hereby incorporated by reference into the specification in its entirety. The name of the text file containing the Sequence Listing is MDN-010-012PCCN_Sequence_Listing.txt. The text file is 1120024 Kilobytes, was created on Jun. 1, 2018, and is being submitted electronically via EFS-Web.

### BACKGROUND OF THE DISCLOSURE

[0003] The ability to modulate an immune response is beneficial in a variety of clinical situations, including the treatment of cancer and pathogenic infections, as well as in potentiating vaccine responses to provide protective immunity. A number of therapeutic tools exist for modulating the function of biological pathways and/or molecules that are involved in diseases such as cancer and pathogenic infections. These tools include, for example, small molecule inhibitors, cytokines and therapeutic antibodies. Some of these tools function through modulating immune responses in a subject, such as cytokines that modulate the activity of cells within the immune system or immune checkpoint inhibitor antibodies, such as anti-CTLA-4 or anti-PD-L1 that modulate the regulation of immune responses.

[0004] Additionally, vaccines have long been used to stimulate an immune response against antigens of pathogens to thereby provide protective immunity against later exposure to the pathogens. More recently, vaccines have been developed using antigens found on tumor cells to thereby enhance anti-tumor immunoresponsiveness. In addition to the antigen(s) used in the vaccine, other agents may be included in a vaccine preparation, or used in combination with the vaccine preparation, to further boost the immune response to the vaccine. Such agents that enhance vaccine responsiveness are referred to in the art as adjuvants. Examples of commonly used vaccine adjuvants include aluminum gels and salts, monophosphoryl lipid A, MF59 oil-in-water emulsion, Freund's complete adjuvant, Freund's incomplete adjuvant, detergents and plant saponins. These adjuvants typically are used with protein or peptide based vaccines. Alternative types of vaccines, such as RNA based vaccines, are now being developed.

[0005] There exists a need in the art for additional effective agents that enhance immune responses to an antigen of interest.

### SUMMARY OF THE DISCLOSURE

[0006] This disclosure provides messenger RNAs (mRNAs) encoding a polypeptide that enhances an immune response to an antigen(s) of interest, referred to herein as immune potentiator constructs. In certain embodiments, the messenger RNAs (mRNAs) are chemically modified, referred to herein as a modified mRNA (mmRNA), wherein the mmRNA comprises one or more modified nucleobases. Alternatively, the mRNA can entirely comprise unmodified nucleobases. In one embodiment, an immune potentiator construct pertains to a messenger RNA (mRNA) encoding a polypeptide that enhances an immune response to an antigen of interest in a subject (optionally wherein said mRNA comprises one or more modified nucleobases), and wherein the immune response comprises a cellular or humoral immune response characterized by:

[0007] (i) stimulating Type I interferon pathway signaling;

[0008] (ii) stimulating NFkB pathway signaling;

[0009] (iii) stimulating an inflammatory response;

[0010] (iv) stimulating cytokine production; or

[0011] (v) stimulating dendritic cell development, activity or mobilization; and

[0012] (vi) a combination of any of (i)-(vi).

[0013] In certain embodiments, the immune potentiator mRNA construct (or combination of immune potentiator mRNA constructs) enhances an immune response to an antigen of interest by a fold magnitude, e.g., relative to the immune response to the antigen in the absence of the immune potentiator, or relative to a small molecular agonist that enhances an immune response to the antigen. For example, in various embodiments, the immune potentiator mRNA construct enhances an immune response to an antigen of interest by 0.3-1000 fold, 1-750 fold, 5-500 fold, 7-250 fold, or 10-100 fold as compared to, for example, the immune response to the antigen in the absence of the immune potentiator mRNA construct or as compared to, for example, the immune response to the antigen in the presence of a small molecular agonist of an immune response to the antigen. In some embodiments, the immune potentiator mRNA construct enhances an immune response to an antigen of interest by at least 2-fold, 3-fold, 4-fold, 5-fold, 7.5-fold, 10-fold, 20-fold, 30-fold, 40-fold, 50-fold, 75-fold, or greater, as compared to, for example, the immune response to the antigen in the absence of the immune potentiator mRNA construct or as compared to, for example, the immune response to the antigen in the presence of a small molecular agonist of an immune response to the antigen.

[0014] The antigen of interest can be an endogenous antigen in a subject (e.g., an endogenous tumor antigen) or an exogenous antigen that is provided to the subject with the immune potentiator construct (e.g., an exogenous tumor antigen or pathogen antigen, including vaccine antigens). Thus, the immune potentiator mRNAs of the disclosure are useful to stimulate or potentiate an immune response in vivo against antigens of interest, such as tumor antigens in the treatment of cancer or pathogen antigens in the treatment of or vaccination against pathogenic diseases.

[0015] In one embodiment, the antigen of interest is an endogenous antigen, such as a tumor antigen and the mRNA immune potentiator construct is provided to a subject in need thereof to stimulate or potentiate an immune response against the tumor antigen. In certain embodiments, the mRNA immune potentiator construct is administered in combination with one or more additional agents, e.g., mRNA constructs, to promote the release of endogenous antigens, for example by inducing immunogenic cell death, such as by necroptosis or pyroptosis. Accordingly, in another aspect, the invention provides mRNA constructs (e.g., mmRNAs) that encode a polypeptide that induces immunogenic cell death, such as necroptosis or pyroptosis. In some aspects, the immunogenic cell death induced by the mRNAs results in release of cytosolic components from the cell (e.g., a tumor cell) such that an immune response against cellular antigens (e.g., endogenous tumor antigens) is stimulated in vivo.

[0016] In other embodiments, the antigen of interest is an exogenous antigen that is encoded by an mRNA, such as a chemically modified mRNA (mmRNA), provided on the same mRNA as the immune potentiator construct or provided on a different mRNA construct as the immune potentiator. The immune potentiator and antigen mRNAs are formulated (or coformulated) and administered (simultaneously or sequentially) to a subject in need thereof to stimulate an immune response against the antigen in the subject.

[0017] In some aspects, the disclosure provides an immune potentiator mRNA (e.g., mmRNA construct) which encodes a polypeptide that enhances an immune response by, for example, stimulating Type I interferon pathway signaling, stimulating NFkB pathway signaling, stimulating an inflammatory response, stimulating cytokine production or stimulating dendritic cell development, activity or mobilization. Enhancement of an immune response to an antigen of interest by an immune potentiator mRNA results in, for example, stimulation of cytokine production, stimulation of cellular immunity (T cell responses), such as antigen-specific CD8⁺ or CD4⁺ T cell responses and/or stimulation of humoral immunity (B cell responses), such as antigen-specific antibody responses, or any combination of the foregoing responses.

[0018] In some aspects, the disclosure provides an immune potentiator mRNA (e.g., mmRNA) encoding a polypeptide that functions downstream of at least one Toll-like receptor (TLR) to thereby enhance an immune response, examples of which are provided herein. In some aspects, the disclosure provides an immune potentiator mRNA (e.g., mmRNA) encoding a polypeptide that stimulates a Type I interferon response, examples of which are provided herein. In some aspects, the disclosure provides an immune potentiator mRNA (e.g., mmRNA) encoding a polypeptide that stimulates an NFkB-mediated proinflammatory response, examples of which are provided herein. In some aspects, the disclosure provides an immune potentiator mRNA (e.g., mmRNA) encoding a polypeptide that is an intracellular adaptor protein, examples of which are provided herein. In some aspects, the disclosure provides an immune potentiator mRNA (e.g., mmRNA) encoding a polypeptide that is an intracellular signaling protein, examples of which are provided herein. In some aspects, the disclosure provides an immune potentiator mRNA (e.g., mmRNA) encoding a polypeptide that is a transcription factor, examples of which are provided herein. In some aspects, the disclosure provides an immune potentiator mRNA (e.g., mmRNA) encoding a polypeptide that is involved in necroptosis or necroptosome formation, examples of which are provided herein. In some aspects, the disclosure provides an immune potentiator mRNA (e.g., mmRNA) encoding a polypeptide that is involved in pyroptosis or inflammasome formation, examples of which are provided herein. Compositions that comprise combinations of two or more immune potentiator mRNAs (of the same class type or of different class types) are also provided.

[0019] In some aspects, the disclosure provides an immune potentiator mRNA (e.g., mmRNA) encoding a constitutively active human STING polypeptide. In one aspect, the constitutively active human STING polypeptide comprises one or more mutations selected from the group consisting of V147L, N154S, V155M, R284M, R284K, R284T, E315Q, R375A, and combinations thereof. In some aspects, the constitutively active human STING polypeptide comprises a V155M mutation (e.g., having the amino acid sequence shown in SEQ ID NO: 1 or encoded by a nucleotide sequence shown in SEQ ID NO: 199, 1319 or 1320). In some aspects, the constitutively active human STING polypeptide comprises mutations V147L/N154S/V155M. In other aspects, the constitutively active human STING polypeptide comprises mutations R284M/V147L/N154S/V155M. In other aspects, the constitutively active human STING polypeptide comprises an amino acid sequence set forth in any one of SEQ ID NOs: 1-10 and 224. In another aspect, the constitutively active human STING polypeptide is encoded by a nucleotide sequence set forth in any one of SEQ ID NOs: 199-208, 225, 1319, 1320, 1442-1450 and 1466.

[0020] In other aspects, the disclosure provides an immune potentiator mRNA (e.g., mmRNA) encoding a constitutively active human IRF3 polypeptide. In one aspect, the constitutively active human IRF3 polypeptide comprises an S396D mutation. In one aspect, the constitutively active human IRF3 polypeptide comprises an amino acid sequence set forth in SEQ ID NO: 11 or is encoded by a nucleotide sequence set forth in SEQ ID NO: 210 or SEQ ID NO: 1452. In one aspect, the constitutively active IRF3 polypeptide is a mouse IRF3 polypeptide, for example comprising an amino acid sequence set forth in SEQ ID NO: 12 or encoded by the nucleotide sequence shown in SEQ ID NO: 211 or SEQ ID NO: 1453.

[0021] In yet other aspects, the disclosure provides an immune potentiator mRNA (e.g., mmRNA) encoding a constitutively active human IRF7 polypeptide. In one aspect, the constitutively active human IRF7 polypeptide comprises one or more mutations selected from the group consisting of S475D, S476D, S477D, S479D, L480D, S483D, S487D, and combinations thereof; deletion of amino acids 247-467; and combinations of the foregoing mutations and/or deletions. In one embodiment, the constitutively active human IRF7 polypeptide comprises an amino acid sequence set forth in any one of SEQ ID NOs: 14-18. In one embodiment, the constitutively active human IRF7 polypeptide is encoded by a nucleotide sequence set forth in any one of SEQ ID NOs: 213-217 and 1454-1459.

[0022] In yet other aspects, the disclosure provides an immune potentiator mRNA (e.g., mmRNA) encoding a polypeptide selected from the group consisting of MyD88, TRAM, IRF1, IRF8, IRF9, TBK1, IKKi, STAT1, STAT2, STAT4, STAT6, c-FLIP, IKKα, IKKβ, RIPK1, TAK-TAB1 fusion, DIABLO, Btk, self-activating caspase-1 and Flt3.

[0023] In other aspects, the disclosure provides mRNA compositions (e.g., mmRNA compositions) comprising one or more mRNA constructs (e.g., mmRNA constructs), encoding an antigen(s) of interest and a polypeptide that enhances an immune response against the antigen(s) of interest, wherein the antigen(s) and the polypeptide are encoded either by the same mRNA (mmRNA) construct or separate mRNA (mmRNA) constructs that can be coformulated and administered, simultaneously or sequentially to a subject in need thereof. Any of the immune potentiator mRNAs (e.g., mmRNAs) described herein (alone or in combination) are useful in one or more compositions for enhancing an immune response to an antigen(s) of interest.

[0024] Accordingly, in some aspects, the disclosure provides a composition comprising a first mRNA (e.g., mmRNA) encoding a polypeptide that enhances an immune response and a second mRNA (e.g., mmRNA) encoding at least one antigen of interest, optionally wherein said first and second mRNAs comprise one or more modified nucleobases, and wherein the polypeptide enhances an immune response to the at least one antigen of interest when the composition is administered to a subject. In one aspect, the composition comprises a single mRNA construct (e.g., mmRNA) encoding both the at least one antigen of interest and the polypeptide that enhances an immune response to the at least one antigen of interest. In another aspect, the composition comprises two mRNA constructs (e.g., mmRNAs), one encoding the at least one antigen of interest and the other encoding the polypeptide that enhances an immune response to the at least one antigen of interest. In some aspects, when the composition comprises two mRNA constructs, the two mRNA constructs (e.g., mmRNAs) are coformulated in the same composition (such as, for example, a lipid nanoparticle) and coadministered to a subject. In other aspects when two or more mRNA constructs are provided, such mRNA constructs can be formulated in different compositions (such as, for example, two or more lipid nanoparticles) and administered (e.g., simultaneously or sequentially) to a subject in need thereof.

[0025] In other aspects, the disclosure provides a composition comprising a first mRNA (e.g., mmRNA) encoding a polypeptide that enhances an immune response and a second mRNA (e.g., mmRNA) encoding at least one antigen of interest, wherein the at least one antigen of interest is at least one tumor antigen. In one aspect, the at least one tumor antigen is at least one mutant KRAS antigen. In one aspect, the at least one mutant KRAS antigen comprises at least one mutation selected from the group consisting of G12D, G12V, G13D, G12C and combinations thereof. In one aspect, the at least one mutant human KRAS antigen comprises an amino acid sequence as set forth in any one of SEQ ID NOs: 95-106 and 131-132. In other aspects, the composition comprises an mRNA construct encoding at least one mutant human KRAS antigen and a constitutively active human STING polypeptide, for example wherein the mRNA encodes an amino acid sequence as set forth in any one of SEQ ID NOs: 107-130. Examplary mRNA nucleotide sequences for constructs encoding at least one mutant human KRAS antigen and a constitutively active human STING polypeptide are shown in SEQ ID NOs: 220-223 and 1462-1465. In other aspects, the tumor antigen is an oncovirus antigen (e.g., a human papilloma virus (HPV) antigen, such as HPV16 E6 or HPV E7 antigen, or combination thereof).

[0026] In other aspects of the composition of the disclosure, the at least one antigen of interest is at least one pathogen antigen. In one aspect, the at least one pathogen antigen is from a pathogen selected from the group consisting of viruses, bacteria, protozoa, fungi and parasites. In one embodiment, the at least one pathogen antigen is at least one viral antigen. In one aspect, the at least one viral antigen is at least one human papillomavirus (HPV) antigen. In one aspect, the HPV antigen is an HPV16 E6 or HPV E7 antigen, or combination thereof. In one aspect, the HPV antigen comprises an amino acid sequence as set forth in in any one of SEQ ID NOs: 36-94. In other aspects of the composition of the disclosure, the at least one pathogen antigen is at least one bacterial antigen. In one embodiment, the at least one bacterial antigen is a multivalent antigen.

[0027] In one embodiment, the antigen of interest is one or more antigens of an oncogenic virus, such as human papilloma virus (HPV), Hepatitis B Virus (HBV), Hepatitis C Virus (HCV), Epstein Barr Virus (EBV), Human T-cell Lymphotropic Virus Type I (HTLV-I), Kaposi's sarcoma herpesvirus (KSHV) or Merkel cell polyomavirus (MCV). In one aspect, an antigen of interest of an oncogenic virus is encoded by an mRNA (e.g., a chemically modified mRNA), and provided on the same mRNA as the immune potentiator construct or provided on a different mRNA construct as the immune potentiator. In some aspects, the immune potentiator and viral antigen(s) mRNAs are formulated (or coformulated) and administered (concurrently or sequentially) to a subject in need thereof to stimulate an immune response against the oncogenic viral antigen(s) in the subject. Suitable oncogenic viral antigens for use with the immune potentiators are described herein.

[0028] In one embodiment, the antigen of interest is one or more tumor antigens that comprise a personalized cancer vaccine. In one aspect, the disclosure provides a vaccine preparation that includes mRNA (e.g., mmRNA) encoding for one or more cancer antigens specific for the cancer subject, referred to as neoepitopes, along with an immune potentiator construct, wherein the cancer antigens and the immune potentiator are encoded by the same or different mRNAs (e.g., mmRNAs). Methods of selecting cancer antigens specific for a cancer subject, and designing personalized cancer vaccines based thereon, are described herein. Accordingly, in one aspect, the disclosure provides a personalized cancer vaccine comprising one or more tumor antigens specific for a cancer subject (e.g., one or more neoepitopes), encoded by one or more mRNAs (e.g., chemically modified mRNAs), wherein the cancer neoepitopes are encoded by the same mRNA or different mRNAs (e.g., each cancer neoepitope is encoded on a separate mRNA construct). In some aspects, the cancer neoepitope(s) are encoded on the same mRNA construct as the immune potentiator construct or encoded on a different mRNA construct as the immune potentiator. The immune potentiator and cancer antigen(s) mRNAs can be formulated (or coformulated) and administered (concurrently or sequentially) to a subject in need thereof to stimulate an immune response against the cancer antigen(s) in the subject.

[0029] In one aspect, the mRNA construct encodes a personalized cancer antigen which is a concatemeric cancer antigen comprised of 2-100 peptide epitopes. In another aspect, the concatemeric cancer antigen comprises one or more of: a) the 2-100 peptide epitopes are interspersed by cleavage sensitive sites; b) the mRNA encoding each peptide epitope is linked directly to one another without a linker; c) the mRNA encoding each peptide epitope is linked to one or another with a single nucleotide linker; d) each peptide epitope comprises 25-35 amino acids and includes a centrally located SNP mutation; e) at least 30% of the peptide epitopes have a highest affinity for class I MHC molecules from a subject; f) at least 30% of the peptide epitopes have a highest affinity for class II MHC molecules from a subject; g) at least 50% of the peptide epitopes have a predicated binding affinity of IC >500 nM for HLA-A, HLA-B and/or DRB1; h) the mRNA encodes 20 peptide epitopes; i) 50% of the peptide epitopes have a binding affinity for class I MHC and 50% of the peptide epitopes have a binding affinity for class II MHC; and/or j) the mRNA encoding the peptide epitopes is arranged such that the peptide epitopes are ordered to minimize pseudo-epitopes.

[0030] In some aspects, the concatemeric cancer antigen comprises 2-100 peptide epitopes, wherein each peptide epitope comprises 31 amino acids and includes a centrally located SNP mutation with 15 flanking amino acids on each side of the SNP mutation. In some aspects, the peptide epitopes are T cell epitopes, B cell epitopes or a combination of T cell epitopes and B cell epitopes. In some aspects, the peptide epitopes comprise at least one MHC class I epitope and at least one MHC class II epitope. In some aspects, at least 30% of the epitopes are MHC class I epitopes or at least 30% of the epitopes are MHC class II epitopes.

[0031] In one embodiment, the antigen of interest is at least one bacterial antigen, for example a bacterial vaccine that comprises at least one bacterial antigen and an immune potentiator construct, encoded on the same or separate mRNAs (e.g., mmRNAs). In one aspect, the disclosure provides a bacterial vaccine that includes mRNA encoding for one or more bacterial antigens along with an immune potentiator construct, wherein the bacterial antigens and the immune potentiator are encoded by the same or different mRNAs. Accordingly, in one aspect, the disclosure provides a bacterial vaccine comprising one or more bacterial antigens (e.g., a multivalent vaccine), (e.g., encoded by one or more chemically modified mRNAs), wherein the bacterial antigens are encoded by the same mRNA or different mRNAs (e.g., each bacterial antigen is encoded on a separate mRNA construct). In some aspects, the bacterial antigens are encoded on the same mRNA construct as the immune potentiator construct or encoded on a different mRNA construct as the immune potentiator. The immune potentiator and bacterial antigen(s) mRNAs can be formulated (or coformulated) and administered (concurrently or sequentially) to a subject in need thereof to stimulate an immune response against the bacterial antigen(s) in the subject

[0032] In some embodiments, the bacterial vaccine is administered to a subject to provide prophylactic treatment (i.e., prevents infection). In some embodiments, the bacterial vaccine is administered to a subject to provide therapeutic treatment (i.e., treats infection). In some embodiments, the bacterial vaccine induces a humoral immune response in the subject (i.e., production of antibodies specific for the bacterial antigen of interest). In some embodiments, the bacterial vaccine induces an adaptive immune response in the subject. Non-limiting examples of suitable bacteria include Staphylococcus aureus.

[0033] In one embodiment, the antigen of interest is a multivalent antigen, (i.e., the antigen comprises multiple antigenic epitopes, such as multiple antigenic peptides comprising the same or different epitopes) to thereby enhance an immune response against the multivalent antigen. In one aspect, the multivalent antigen is a concatemeric antigen. In some embodiments, the mRNA vaccines described herein comprise an mRNA having an open reading frame encoding a concatemeric antigen comprised of 2-100 peptide epitopes (e.g., the same or different epitopes). In one embodiment, the multivalent antigen is a cancer antigen. In another embodiment, the multivalent antigen is a bacterial antigen. Non-limiting examples of multivalent antigens are described herein.

[0034] An mRNA (e.g., mmRNA) construct of the disclosure (e.g., an immune potentiator mRNA, antigen-encoding mRNA, or combination thereof) can comprise, for example, a 5′ UTR, a codon optimized open reading frame encoding the polypeptide, a 3′ UTR and a 3′ tailing region of linked nucleosides. In one embodiment, the mRNA further comprises one or more microRNA (miRNA) binding sites.

[0035] In one embodiment, a modified mRNA construct of the disclosure is fully modified. For example, in one embodiment, the mmRNA comprises pseudouridine (ψ), pseudouridine (ψ) and 5-methyl-cytidine (m⁵C), 1-methyl-pseudouridine (m¹ψ), 1-methyl-pseudouridine (m¹ψ) and 5-methyl-cytidine (m⁵C), 2-thiouridine (s²U), 2-thiouridine and 5-methyl-cytidine (m⁵C), 5-methoxy-uridine (mo⁵U), 5-methoxy-uridine (mo⁵U) and 5-methyl-cytidine (m⁵C), 2′-O-methyl uridine, 2′-O-methyl uridine and 5-methyl-cytidine (m⁵C), N6-methyl-adenosine (m⁶A) or N6-methyl-adenosine (m⁶A) and 5-methyl-cytidine (m⁵C). In another embodiment, the mmRNA comprises pseudouridine (ψ), N1-methylpseudouridine (m¹ψ), 2-thiouridine, 4′-thiouridine, 5-methylcytosine, 2-thio-1-methyl-1-deaza-pseudouridine, 2-thio-1-methyl-pseudouridine, 2-thio-5-aza-uridine, 2-thio-dihydropseudouridine, 2-thio-dihydrouridine, 2-thio-pseudouridine, 4-methoxy-2-thio-pseudouridine, 4-methoxy-pseudouridine, 4-thio-1-methyl-pseudouridine, 4-thio-pseudouridine, 5-aza-uridine, dihydropseudouridine, 5-methoxyuridine, or 2′-O-methyl uridine, or combinations thereof. In yet another embodiment, the mmRNA comprises 1-methyl-pseudouridine (m¹ψ), 5-methoxy-uridine (mo⁵U), 5-methyl-cytidine (m⁵C), pseudouridine (ψ), α-thio-guanosine, or α-thio-adenosine, or combinations thereof.

[0036] In another aspect, the disclosure pertains to a lipid nanoparticle comprising an mRNA (e.g., modified mRNA) of the disclosure. In one embodiment, the lipid nanoparticle is a liposome. In another embodiment, the lipid nanoparticle comprises a cationic and/or ionizable lipid. In one embodiment, the cationic and/or ionizable lipid is 2,2-dilinoleyl-4-methylaminoethyl-[1,3]-dioxolane (DLin-KC2-DMA) or dilinoleyl-methyl-4-dimethylaminobutyrate (DLin-MC3-DMA). In one embodiment, the lipid nanoparticle further comprises a targeting moiety conjugated to the outer surface of the lipid nanoparticle.

[0037] In another aspect, the disclosure pertains to a pharmaceutical composition comprising an mRNA (e.g., mmRNA) of the disclosure or a lipid nanoparticle of the disclosure, and a pharmaceutically acceptable carrier, diluent or excipient.

[0038] In some aspects, the disclosure provides an immunomodulatory therapeutic composition of any one of the foregoing or related embodiments, wherein each mRNA is formulated in the same or different lipid nanoparticle carrier. In some aspects, each mRNA encoding an antigen(s) of interest (e.g., cancer antigen, viral antigen, bacterial antigen) is formulated in the same or different lipid nanoparticle carrier. In some aspects, each mRNA encoding the immune potentiator that enhances an immune response to the antigen(s) of interest is formulated in the same or different lipid nanoparticle carrier. In some aspects, each mRNA encoding an antigen(s) of interest is formulated in the same lipid nanoparticle carrier and each mRNA encoding an immune potentiator is formulated in a different lipid nanoparticle carrier. In some aspects, each mRNA encoding the antigen(s) of interest is formulated in the same lipid nanoparticle carrier and each mRNA encoding an immune potentiator is formulated in the same lipid nanoparticle carrier as each mRNA encoding the antigen(s) of interest. In some aspects, each mRNA encoding an antigen(s) of interest is formulated in a different lipid nanoparticle carrier and each mRNA encoding immune potentiator is formulated in the same lipid nanoparticle carrier as each mRNA encoding each antigen(s) of interest (e.g., cancer antigen, viral antigen, bacterial antigen).

[0039] In some aspects, the disclosure provides an immunomodulatory therapeutic composition of any one of the foregoing embodiments, wherein the immunomodulatory therapeutic composition is formulated in a lipid nanoparticle, wherein the lipid nanoparticle comprises a molar ratio of about 20-60% ionizable amino lipid:5-25% phospholipid:25-55% sterol; and 0.5-15% PEG-modified lipid. In some aspects, the ionizable amino lipid is selected from the group consisting of for example, 2,2-dilinoleyl-4-dimethylaminoethyl-[1,3]-dioxolane (DLin-KC2-DMA), dilinoleyl-methyl-4-dimethylaminobutyrate (DLin-MC3-DMA), and di((Z)-non-2-en-1-yl) 9-((4-(dimethylamino)butanoyl)oxy)heptadecanedioate (L319).

[0040] In some aspects, the disclosure provides an immunomodulatory therapeutic composition of any one of the foregoing or related embodiments, wherein each mRNA includes at least one chemical modification. In some aspects, the chemical modification is selected from the group consisting of pseudouridine, N1-methylpseudouridine, 2-thiouridine, 4′-thiouridine, 5-methylcytosine, 2-thio-1-methyl-1-deaza-pseudouridine, 2-thio-1-methyl-pseudouridine, 2-thio-5-aza-uridine, 2-thio-dihydropseudouridine, 2-thio-dihydrouridine, 2-thio-pseudouridine, 4-methoxy-2-thio-pseudouridine, 4-methoxy-pseudouridine, 4-thio-1-methyl-pseudouridine, 4-thio-pseudouridine, 5-aza-uridine, dihydropseudouridine, 5-methyluridine, 5-methyluridine, 5-methoxyuridine, and 2′-O-methyl uridine.

[0041] In other aspects, the disclosure provides a lipid nanoparticle carrier comprising a pharmaceutical composition, wherein the pharmaceutical composition comprises:

[0042] (i) an mRNA having an open reading frame encoding an HPV antigen; or

[0043] an mRNA having an open reading frame encoding an HPV16 antigen; or

[0044] an mRNA having an open reading frame encoding an HPV18 antigen; or

[0045] an mRNA having an open reading frame encoding at least one HPV E6 antigen; or

[0046] an mRNA having an open reading frame encoding at least one HPV E7 antigen; or

[0047] an mRNA having an open reading frame encoding at least one HPV E6 antigen and at least one HPV E7 antigen; and

[0048] (ii) an mRNA having an open reading frame encoding a constitutively active human STING polypeptide; and

[0049] a pharmaceutically acceptable carrier or excipient.

[0050] In some aspects of the foregoing lipid nanoparticle carrier, the constitutively active human STING polypeptide comprises mutation V155M. In some aspects, the constitutively active human STING polypeptide comprises the amino acid sequence shown in SEQ ID NO: 1. In some aspects, the mRNA encoding the constitutively active human STING polypeptide comprises a 3′ UTR comprising at least one miR-122 microRNA binding site. In some aspects, the mRNA encoding the constitutively active human STING polypeptide comprises the nucleotide sequence shown in SEQ ID NO: 199, 1319 or 1320.

[0051] In some aspects, the disclosure provides a lipid nanoparticle of any one of the foregoing embodiments, wherein the lipid nanoparticle comprises a molar ratio of about 20-60% ionizable amino lipid:5-25% phospholipid:25-55% sterol; and 0.5-15% PEG-modified lipid. In some aspects, the ionizable amino lipid is selected from the group consisting of for example, 2,2-dilinoleyl-4-dimethylaminoethyl-[1,3]-dioxolane (DLin-KC2-DMA), dilinoleyl-methyl-4-dimethylaminobutyrate (DLin-MC3-DMA), and di((Z)-non-2-en-1-yl) 9-((4-(dimethylamino)butanoyl)oxy)heptadecanedioate (L319). In certain embodiments, the lipid nanoparticle comprises Compound 25 (as the ionizable amino lipid), DSPC (as the phospholipid), cholesterol (as the sterol) and PEG-DMG (as the PEG-modified lipid). In certain embodiments, the lipid nanoparticle comprises a molar ratio of about 20-60% Compound 25:5-25% DSPC:25-55% cholesterol; and 0.5-15% PEG-DMG. In one embodiment, the lipid nanoparticle comprises a molar ratio of about 50% Compound 25:about 10% DSPC:about 38.5% cholesterol:about 1.5% PEG-DMG (i.e., Compound 25:DSPC:cholesterol:PEG-DMG at about a 50:10:38.5:1.5 ratio). In one embodiment, the lipid nanoparticle comprises a molar ratio of 50% Compound 25:10% DSPC:38.5% cholesterol:1.5% PEG-DMG (i.e., Compound 25:DSPC:cholesterol:PEG-DMG at a 50:10:38.5:1.5 ratio).

[0052] In some aspects, the disclosure provides a drug product, such as a vaccine, comprising any of the foregoing or related lipid nanoparticle carriers for use in therapy, for example, prophylactic or therapeutic treatment (e.g., cancer therapy), optionally with instructions for use in such therapy.

[0053] In some aspects related to the foregoing drug product or vaccine, the disclosure provides a first lipid nanoparticle carrier comprising a pharmaceutical composition, wherein the pharmaceutical composition comprises: an mRNA having an open reading frame encoding at least one first antigen of interest (e.g., at least one cancer antigen, viral antigen, bacterial antigen); an mRNA having an open reading frame encoding a constitutively active human STING polypeptide; and a pharmaceutically acceptable carrier or excipient.

[0054] In some aspects, the disclosure provides a second lipid nanoparticle carrier comprising a pharmaceutical composition, wherein the pharmaceutical composition comprises: an mRNA having an open reading frame encoding at least one second antigen of interest (e.g., at least one cancer antigen, viral antigen, bacterial antigen); an mRNA having an open reading frame encoding a constitutively active human STING polypeptide; and a pharmaceutically acceptable carrier or excipient.

[0055] In some aspects, the disclosure provides a third lipid nanoparticle carrier comprising a pharmaceutical composition, wherein the pharmaceutical composition comprises: an mRNAs having an open reading frame encoding at least one third antigen of interest (e.g., at least one cancer antigen, viral antigen, bacterial antigen); an mRNA having an open reading frame encoding a constitutively active human STING polypeptide; and a pharmaceutically acceptable carrier or excipient.

[0056] In some aspects, the disclosure provides a fourth lipid nanoparticle carrier comprising a pharmaceutical composition, wherein the pharmaceutical composition comprises: an mRNAs having an open reading frame encoding at least one fourth antigen of interest (e.g., at least one (e.g., cancer antigen, viral antigen, bacterial antigen); an mRNA having an open reading frame encoding a constitutively active human STING polypeptide; and a pharmaceutically acceptable carrier or excipient.

[0057] In other aspects, the disclosure provides a first lipid nanoparticle carrier comprising a pharmaceutical composition, wherein the pharmaceutical composition comprises: an mRNA having an open reading frame encoding at least one HPV antigen (e.g., at least one E6 antigen and/or at least one E7 antigen); an mRNA having an open reading frame encoding a constitutively active human STING polypeptide; and a pharmaceutically acceptable carrier or excipient.

[0058] In some aspects, the disclosure provides a second lipid nanoparticle carrier comprising a pharmaceutical composition, wherein the pharmaceutical composition comprises: an mRNA having an open reading frame encoding at least one second HPV antigen (e.g., at least one E6 antigen and/or at least one E7 antigen); an mRNA having an open reading frame encoding a constitutively active human STING polypeptide; and a pharmaceutically acceptable carrier or excipient.

[0059] In some aspects, the disclosure provides a third lipid nanoparticle carrier comprising a pharmaceutical composition, wherein the pharmaceutical composition comprises: an mRNAs having an open reading frame encoding at least one third HPV antigen (e.g., at least one E6 antigen and/or at least one E7 antigen); an mRNA having an open reading frame encoding a constitutively active human STING polypeptide; and a pharmaceutically acceptable carrier or excipient.

[0060] In some aspects, the disclosure provides a fourth lipid nanoparticle carrier comprising a pharmaceutical composition, wherein the pharmaceutical composition comprises: an mRNAs having an open reading frame encoding at least one fourth HPV antigen (e.g., at least one E6 antigen and/or at least one E7 antigen); an mRNA having an open reading frame encoding a constitutively active human STING polypeptide; and a pharmaceutically acceptable carrier or excipient.

[0061] In some aspects of the foregoing drug product or vaccine, each of the first, second, third and fourth lipid nanoparticle carriers, comprises a peptide antigen comprising 20, 21, 22, 23, 24, or 25 amino acids in length. In some aspects, each peptide antigen comprises 25 amino acids in length.

[0062] In some aspects of the foregoing first, second, third and fourth lipid nanoparticle carriers, wherein the HPV antigen(s) comprises one or more of the amino acid sequences set forth in SEQ ID NOs: 36-72. In some aspects, the HPV antigen(s) comprises one or more of the amino acid sequences set forth in SEQ ID NOs: 73-94.

[0063] In some aspects of the foregoing first, second, third and fourth lipid nanoparticle carriers, the constitutively active human STING polypeptide comprises mutation V155M. In some aspects, the constitutively active human STING polypeptide comprises the amino acid sequence shown in SEQ ID NO: 1. In some aspects, the constitutively active human STING polypeptide comprises a 3′ UTR comprising at least one miR-122 microRNA binding site. In some aspects, the mRNA encoding the constitutively active human STING polypeptide comprises the nucleotide sequence shown in SEQ ID NO: 199, 1319 or 1320.

[0064] In some aspects, the disclosure provides a drug product, such as a vaccine, comprising any of the foregoing or related lipid nanoparticle carriers for use in prophylactic or therapeutic treatment (e.g., cancer therapy), optionally with instructions for use in therapy. In some aspects, the disclosure provides a drug product, such as a vaccine, comprising any of the foregoing first, second, third and fourth lipid nanoparticle carriers, for use in cancer therapy, optionally with instructions for use in cancer therapy.

[0065] In some aspects, the disclosure provides a drug product, such as a vaccine, comprising a first, second, third and fourth lipid nanoparticle carriers, for use in prophylactic or therapeutic treatment (e.g., cancer therapy), optionally with instructions for use in therapy, wherein:

[0066] (i) the first lipid nanoparticle carrier comprises a pharmaceutical composition, wherein the pharmaceutical composition comprises: an mRNA having an open reading frame encoding at least one first antigen of interest (e.g., at least one cancer antigen, viral antigen, bacterial antigen, for example, at least one E6 antigen and/or at least one E7 antigen); an mRNA having an open reading frame encoding a constitutively active human STING polypeptide; and a pharmaceutically acceptable carrier or excipient;

[0067] (ii) the second lipid nanoparticle carrier comprises a pharmaceutical composition, wherein the pharmaceutical composition comprises: an mRNA having an open reading frame encoding at least one second antigen of interest (e.g., cancer antigen, viral antigen, bacterial antigen, for example, at least one E6 antigen and/or at least one E7 antigen); an mRNA having an open reading frame encoding a constitutively active human STING polypeptide; and a pharmaceutically acceptable carrier or excipient;

[0068] (iii) the third lipid nanoparticle carrier comprises a pharmaceutical composition, wherein the pharmaceutical composition comprises: an mRNA having an open reading frame encoding at least one third antigen of interest (e.g., cancer antigen, viral antigen, bacterial antigen, for example, at least one E6 antigen and/or at least one E7 antigen); an mRNA having an open reading frame encoding a constitutively active human STING polypeptide; and a pharmaceutically acceptable carrier or excipient; and

[0069] (iv) the fourth lipid nanoparticle carrier comprises a pharmaceutical composition, wherein the pharmaceutical composition comprises: an mRNA having an open reading frame encoding at least one fourth antigen of interest (e.g., cancer antigen, viral antigen, bacterial antigen, for example, at least one E6 antigen and/or at least one E7 antigen); an mRNA having an open reading frame encoding a constitutively active human STING polypeptide; and a pharmaceutically acceptable carrier or excipient.

[0070] In any of the foregoing or related aspects, the disclosure provides a method for treating a subject, comprising: administering to a subject in need thereof any of the foregoing or related immunomodulatory therapeutic compositions or any of the foregoing or related lipid nanoparticle carriers. In some aspects, the immunomodulatory therapeutic composition or lipid nanoparticle carrier is administered in combination with another therapeutic agent (e.g., a cancer therapeutic agent). In some aspects, the immunomodulatory therapeutic composition or lipid nanoparticle carrier is administered in combination with an inhibitory checkpoint polypeptide. In some aspects, the inhibitory checkpoint polypeptide is an antibody or fragment thereof that specifically binds to a molecule selected from the group consisting of PD-1, PD-L1, TIM-3, VISTA, A2AR, B7-H3, B7-H4, BTLA, CTLA-4, IDO, KIR and LAG3.

[0071] In some aspects, the disclosure provides a composition (e.g., a vaccine) comprising an mRNA encoding an antigen of interest and an mRNA encoding a polypeptide that enhances an immune response to the antigen of interest (e.g., immune potentiator, e.g., STING polypeptide) wherein the mRNA encoding the antigen of interest (Ag) and the mRNA encoding the polypeptide that enhances an immune response to the antigen of interest (e.g., immune potentiator (IP), e.g., STING polypeptide) are formulated at an Ag:IP mass ratio of 1:1, 2:1, 3:1, 4:1, 5:1, 6:1, 7:1, 8:1, 9:1, 10:1 or 20:1. Alternatively, the IP:Ag mass ratio can be, for example: 1:1, 1:2, 1:3, 1:4, 1:5, 1:6, 1:7, 1:8, 1:9, 1:10 or 1:20. In some aspects, the composition is formulated at a mass ratio of 5:1 of mRNA encoding the antigen of interest to the mRNA encoding the polypeptide that enhances an immune to the antigen of interest (e.g., immune potentiator, e.g., STING polypeptide) (i.e., Ag:IP ratio of 5:1 or, alternatively, IP:Ag ratio of 1:5). In some aspects, the composition is formulated at a mass ratio of 10:1 of mRNA encoding the antigen of interest to the mRNA encoding the polypeptide that enhances an immune to the antigen of interest (e.g., immune potentiator, e.g., STING polypeptide) (i.e., Ag:IP ratio of 10:1 or, alternatively, IP:Ag ratio of 1:10).

[0072] In another aspect, the disclosure pertains to a method for enhancing an immune response to an antigen(s) of interest, the method comprising administering to a subject in need thereof a mmRNA composition of disclosure encoding an antigen(s) of interest and a polypeptide that enhances an immune response to the antigen(s) of interest, or lipid nanoparticle thereof, or pharmaceutical composition thereof, such that an immune response to the antigen of interest is enhanced in the subject. In one aspect, enhancing an immune response in a subject comprises stimulating cytokine production (e.g., IFN-γ or TNF-α). In another aspect, enhancing an immune response in a subject comprises stimulating antigen-specific CD8⁺ T cell activity, e.g., priming, proliferation and/or survival (e.g., increasing the effector/memory T cell population). In one aspect, enhancing an immune response in a subject comprises stimulating antigen-specific CD4⁺ T cell activity (e.g., increasing helper T cell activity). In other aspects, enhancing an immune response in a subject comprises stimulating B cell responses (e.g., increasing antibody production).

[0073] In some aspects, enhancing an immune response in a subject comprises stimulating cytokine production, stimulating antigen-specific CD8⁺ T cell responses, stimulating antigen-specific CD4⁺ helper cell responses, increasing the effector memory CD62L^{lo} T cell population, stimulating B cell activity or stimulating antigen-specific antibody production, or any combination of the foregoing responses.

[0074] In some aspects, the enhanced immune response comprises stimulating cytokine production, wherein the cytokine is IFN-γ or TNF-α, or both. In some aspects, the enhanced immune response comprises stimulating antigen-specific CD8⁺ T cell responses, wherein the antigen-specific CD8⁺ T cell response comprises CD8⁺ T cell proliferation or CD8⁺ T cell cytokine production or both. In some aspects, CD8⁺ T cell cytokine production increases by at least 5% or at least 10% or at least 15% or at least 20% or at least 25% or at least 30% or at least 35% or at least 40% or at least 45% or at least 50%.

[0075] In some aspects, the enhanced immune response comprises an antigen-specific CD8⁺ T cell response, wherein the CD8⁺ T cell response comprises CD8⁺ T cell proliferation, and wherein the percentage of CD8⁺ T cells among the total T cell population increases by at least 5% or at least 10% or at least 15% or at least 20% or at least 25% or at least 30% or at least 35% or at least 40% or at least 45% or at least 50%.

[0076] In some aspects, the enhanced immune response comprises an antigen-specific CD8⁺ T cell response, wherein the CD8⁺ T cell response comprises an increase in the percentage of effector memory CD62L^{lo} T cells among CD8⁺ T cells.

[0077] In another aspect, the disclosure pertains to a method for enhancing an immune response to an antigen(s) of interest, the method comprising administering to a subject in need thereof an mRNA composition of disclosure encoding an antigen(s) of interest and a polypeptide that enhances an immune response to the antigen(s) of interest, or lipid nanoparticle thereof, or pharmaceutical composition thereof, such that an immune response to the antigen of interest is enhanced in the subject, wherein the immune response to the antigen of interest is maintained for greater than 10 days, for greater than 15 days, for greater than 20 days, for greater than 25 days, for greater than 30 days, for greater than 40 days, for greater than 50 days, for greater than 60 days, for greater than 70 days, for greater than 80 days, for greater than 90 days, greater than 100, 120, 150, 200, 250, 300 days or 1 year or more.

[0078] In one aspect, the disclosure provides methods for enhancing an immune response to an antigen(s) of interest, wherein the subject is administered two different immune potentiator mRNA (e.g., mmRNA) constructs (wherein one or both constructs also encode, or are administered with an mRNA (e.g., mmRNA) construct that encodes, the antigen(s) of interest), either at the same time or sequentially. In one aspect, the subject is administered an immune potentiator mRNA composition that stimulates dendritic cell development or activity prior to administering to the subject an immune potentiator mmRNA composition that stimulates Type I interferon pathway signaling.

[0079] In other aspects, the disclosure provides methods of stimulating an immune response to a tumor in a subject in need thereof, wherein the method comprises administering to the subject an effective amount of a composition comprising at least one mRNA construct encoding a tumor antigen(s) and an mRNA construct encoding a polypeptide that enhances an immune response to the tumor antigen(s), or a lipid nanoparticle thereof, or a pharmaceutical composition thereof, such that an immune response to the tumor is stimulated in the subject. In one aspect, the tumor is a liver cancer, a colorectal cancer, a pancreatic cancer, a non-small cell lung cancer (NSCLC), a melanoma cancer, a cervical cancer or a head or neck cancer. In some aspects, the subject is a human.

[0080] In one embodiment, the disclosure provides a method of preventing or treating an Human Papilloma Virus (HPV)-associated cancer in a subject in need thereof, the method comprising administering to the subject a composition comprising at least one mRNA construct encoding: (i) at least one HPV antigen of interest and (ii) a polypeptide that enhances an immune response against the at least one HPV antigen of interest, such that an immune response to the at least one HPV antigen of interest is enhanced. In one embodiment, the polypeptide that enhances an immune response against the at least one HPV antigen(s) of interest is a STING polypeptide. In one embodiment, the at least one HPV antigen is at least one E6 antigen, at least one E7 antigen or a combination of at least one E6 antigen and at least one E7 antigen (e.g, soluble or intracellular forms of E6 and/or E7). In one embodiment, the at least one HPV antigen and the polypeptide are encoded on separate mRNAs and are coformulated in a lipid nanoparticular prior to administration to the subject. Alternatively, the HPV antigen(s) and polypeptide can be encoded on the same mRNA. In one embodiment, the subject is at risk for exposure to HPV and the composition is administered prior to exposure to HPV. In another embodiment, the subject is infected with HPV or has an HPV-associated cancer. In one embodiment, the HPV-associated cancer is selected from the group consisting of cervical, penile, vaginal, vulval, anal and oropharyngeal cancers. In one embodiment, the subject with cancer is also treated with an immune checkpoint inhibitor.

[0081] In another aspect, the disclosure provides methods of stimulating an immune response to a pathogen in a subject in need thereof, wherein the method comprises administering to the subject an effective amount of a composition comprising at least one mRNA construct encoding a pathogen antigen(s) and an mRNA construct encoding a polypeptide that enhances an immune response to the pathogen antigen(s), or a lipid nanoparticle thereof, or a pharmaceutical composition thereof, such that an immune response to the pathogen is stimulated in the subject. In one aspect, the pathogen is selected from the group consisting of viruses, bacteria, protozoa, fungi and parasites. In one aspect, the pathogen is a virus, such as a human papillomavirus (HPV). In one aspect, the pathogen is a bacteria. In one aspect, the subject is a human.

[0082] In any of the foregoing or related aspects, the disclosure provides a pharmaceutical composition comprising the lipid nanoparticle, and a pharmaceutically acceptable carrier. In some aspects, the pharmaceutical composition is formulated for intramuscular delivery.

[0083] In any of the foregoing or related aspects, the disclosure provides a lipid nanoparticle, and an optional pharmaceutically acceptable carrier, or a pharmaceutical composition for use in enhancing an immune response in an individual (e.g., treating or delaying progression of cancer in an individual), wherein the treatment comprises administration of the composition in combination with a second composition, wherein the second composition comprises a checkpoint inhibitor polypeptide and an optional pharmaceutically acceptable carrier.

[0084] In any of the foregoing or related aspects, the disclosure provides use of a lipid nanoparticle, and an optional pharmaceutically acceptable carrier, in the manufacture of a medicament for enhancing an immune response in an individual (e.g., treating or delaying progression of cancer in an individual), wherein the medicament comprises the lipid nanoparticle and an optional pharmaceutically acceptable carrier and wherein the treatment comprises administration of the medicament, optionally in combination with a composition comprising a checkpoint inhibitor polypeptide and an optional pharmaceutically acceptable carrier.

[0085] In any of the foregoing or related aspects, the disclosure provides a kit comprising a container comprising a lipid nanoparticle, and an optional pharmaceutically acceptable carrier, or a pharmaceutical composition, and a package insert comprising instructions for administration of the lipid nanoparticle or pharmaceutical composition for enhancing an immune response in an individual (e.g., treating or delaying progression of cancer in an individual). In some aspects, the package insert further comprises instructions for administration of the lipid nanoparticle or pharmaceutical composition alone, or in combination with a composition comprising a checkpoint inhibitor polypeptide and an optional pharmaceutically acceptable carrier for enhancing an immune response in an individual (e.g., treating or delaying progression of cancer in an individual).

[0086] In any of the foregoing or related aspects, the disclosure provides a kit comprising a medicament comprising a lipid nanoparticle, and an optional pharmaceutically acceptable carrier, or a pharmaceutical composition, and a package insert comprising instructions for administration of the medicament alone or in combination with a composition comprising a checkpoint inhibitor polypeptide and an optional pharmaceutically acceptable carrier for enhancing an immune response in an individual (e.g., treating or delaying progression of cancer in an individual). In some aspects, the kit further comprises a package insert comprising instructions for administration of the first medicament prior to, current with, or subsequent to administration of the second medicament for enhancing an immune response in an individual (e.g., treating or delaying progression of cancer in an individual).

[0087] In any of the foregoing or related aspects, the disclosure provides a lipid nanoparticle, a composition, or the use thereof, or a kit comprising a lipid nanoparticle or a composition as described herein, wherein the checkpoint inhibitor polypeptide inhibits PD1, PD-L1, CTLA4, or a combination thereof. In some aspects, the checkpoint inhibitor polypeptide is an antibody. In some aspects, the checkpoint inhibitor polypeptide is an antibody selected from an anti-CTLA4 antibody or antigen-binding fragment thereof that specifically binds CTLA4, an anti-PD1 antibody or antigen-binding fragment thereof that specifically binds PD1, an anti-PD-L1 antibody or antigen-binding fragment thereof that specifically binds PD-L1, and a combination thereof. In some aspects, the checkpoint inhibitor polypeptide is an anti-PD-L1 antibody selected from atezolizumab, avelumab, or durvalumab. In some aspects, the checkpoint inhibitor polypeptide is an anti-CTLA-4 antibody selected from tremelimumab or ipilimumab. In some aspects, the checkpoint inhibitor polypeptide is an anti-PD1 antibody selected from nivolumab or pembrolizumab.

[0088] In related aspects, the disclosure provides a method of reducing or decreasing a size of a tumor or inhibiting a tumor growth in a subject in need thereof comprising administering to the subject any of the foregoing or related lipid nanoparticles of the disclosure, or any of the foregoing or related compositions of the disclosure.

[0089] In related aspects, the disclosure provides a method inducing an anti-tumor response in a subject with cancer comprising administering to the subject any of the foregoing or related lipid nanoparticles of the disclosure, or any of the foregoing or related compositions of the disclosure. In some aspects, the anti-tumor response comprises a T-cell response. In some aspects, the T-cell response comprises CD8⁺ T cells.

[0090] In some aspects of the foregoing methods, the composition is administered by intramuscular injection.

[0091] In some aspects of the foregoing methods, the method further comprises administering a second composition comprising a checkpoint inhibitor polypeptide, and an optional pharmaceutically acceptable carrier. In some aspects, the checkpoint inhibitor polypeptide inhibits PD1, PD-L1, CTLA4, or a combination thereof. In some aspects, the checkpoint inhibitor polypeptide is an antibody. In some aspects, the checkpoint inhibitor polypeptide is an antibody selected from an anti-CTLA4 antibody or antigen-binding fragment thereof that specifically binds CTLA4, an anti-PD1 antibody or antigen-binding fragment thereof that specifically binds PD1, an anti-PD-L1 antibody or antigen-binding fragment thereof that specifically binds PD-L1, and a combination thereof. In some aspects, the checkpoint inhibitor polypeptide is an anti-PD-L1 antibody selected from atezolizumab, avelumab, or durvalumab. In some aspects, the checkpoint inhibitor polypeptide is an anti-CTLA-4 antibody selected from tremelimumab or ipilimumab. In some aspects, the checkpoint inhibitor polypeptide is an anti-PD1 antibody selected from nivolumab or pembrolizumab.

[0092] In some aspects of any of the foregoing or related methods, the composition comprising the checkpoint inhibitor polypeptide is administered by intravenous injection. In some aspects, the composition comprising the checkpoint inhibitor polypeptide is administered once every 2 to 3 weeks. In some aspects, the composition comprising the checkpoint inhibitor polypeptide is administered once every 2 weeks or once every 3 weeks. In some aspects, the composition comprising the checkpoint inhibitor polypeptide is administered prior to, concurrent with, or subsequent to administration of the lipid nanoparticle or pharmaceutical composition thereof.

### BRIEF DESCRIPTION OF THE DRAWINGS

[0093] FIG. 1 is a bar graph showing stimulation of IFN-β production in TF1a cells transfected with constitutively active STING mRNA constructs.

[0094] FIG. 2 is a bar graph showing activation of an interferon-sensitive response element (ISRE) by constitutively active STING constructs. STING variants 23a and 23b correspond to SEQ ID NO: 1, STING variant 42 corresponds to SEQ ID NO: 2, STING variants 19, 21a and 21b correspond to SEQ ID NO: 3, STING variant 41 corresponds to SEQ ID NO: 4, STING variant 43 corresponds to SEQ ID NO: 5, STING variant 45 corresponds to SEQ ID NO: 6, STING variant 46 corresponds to SEQ ID NO: 7, STING variant 47 corresponds to SEQ ID NO: 8, STING variant 56 corresponds to SEQ ID NO: 9 and STING variant 57 corresponds to SEQ ID NO: 10.

[0095] FIGS. 3A-3B are bar graphs showing activation of an interferon-sensitive response element (ISRE) by constitutively active IRF3 constructs (FIG. 3A) or constitutively active IRF7 constructs (FIG. 3B). IRF3 variants 1, 3 and 4 correspond to SEQ ID NO: 12 and IRF3 variants 2 and 5 correspond to SEQ ID NO: 11 (variants have different tags). IRF7 variant 36 corresponds to SEQ ID NO: 18 and variant 31 is the murine version of SEQ ID NO: 18. IRF7 variant 32 corresponds to SEQ ID NO: 17 and IRF7 variant 33 corresponds to SEQ ID NO: 14.

[0096] FIG. 4 is a bar graph showing activation of an NFκB-luciferase reporter gene by constitutively active cFLIP and IKKβ mRNA constructs.

[0097] FIG. 5 is a graph showing activation of an NFκB-luciferase reporter gene by constitutively active RIPK1 mRNA constructs.

[0098] FIG. 6 is a bar graph showing TNF-α induction in SKOV3 cells transfected with DIABLO mRNA constructs.

[0099] FIG. 7 is a bar graph showing interleukin 6 (IL-6) induction in SKOV3 cells transfected with DIABLO mRNA constructs.

[0100] FIGS. 8A-8B are graphs showing intracellular staining (ICS) of CD8⁺ splenocytes from mice immunized with HPV E6/E7 vaccine constructs coformulated with either a STING, IRF3 or IRF7 immune potentiator mRNA construct on day 21 post first immunization. FIG. 8A shows E7-specific responses for IFN-γ ICS. FIG. 8B shows E7-specific responses for TNF-α ICS.

[0101] FIGS. 9A-9B are graphs showing intracellular staining (ICS) of CD8⁺ splenocytes from mice immunized with HPV E6/E7 vaccine constructs coformulated with either a STING, IRF3 or IRF7 immune potentiator mRNA construct. FIG. 9A shows E6-specific responses for IFN-γ ICS. FIG. 9B shows 67-specific responses for TNF-α ICS.

[0102] FIGS. 10A-10B are graphs showing E7-specific responses for IFN-γ intracellular staining (ICS) of day 21 (FIG. 10A) or day 53 (FIG. 10B) CD8⁺ splenocytes from mice immunized with HPV E6/E7 vaccine constructs coformulated with either a STING, IRF3 or IRF7 immune potentiator mRNA construct.

[0103] FIGS. 11A-11B are graphs showing intracellular staining (ICS) of CD8⁺ splenocytes for IFN-γ on days 21 and 53 from mice immunized with HPV E6/E7 vaccine constructs coformulated with either a STING, IRF3 or IRF7 immune potentiator mRNA construct. FIG. 11A shows E7-specific responses from mice immunized with intracellular E6/E7. FIG. 11B shows E7-specific responses from mice immunized with soluble E6/E7.

[0104] FIGS. 12A-12B are graphs showing the percentage of CD8b⁺ cells among the live CD45⁺ cells for day 21 (FIG. 12A) or day 53 (FIG. 12B) spleen cells from mice immunized with HPV E6/E7 vaccine constructs coformulated with either a STING, IRF3 or IRF7 immune potentiator mRNA construct.

[0105] FIGS. 13A-13B are graphs showing E7-MHC1-tetramer (specific for the epitope RAHYNIVTF) staining of day 21 (FIG. 13A) or day 53 (FIG. 13B) CD8b⁺ splenocytes from mice immunized with HPV E6/E7 vaccine constructs coformulated with either a STING, IRF3 or IRF7 immune potentiator mRNA construct.

[0106] FIGS. 14A-14D are graphs showing that the majority of E7-tetramer⁺ CD8⁺ cells have an “effector memory” CD62L^{lo} phenotype, with comparison of day 21 versus day 53 E7-tetramer⁺ CD8 cells demonstrating that this “effector-memory” CD62L^{lo} phenotype was maintained throughout the study. FIG. 14A (day 21) and 14B (day 53) show increased % of CD8 with effector memory CD62Llo phenotype. FIGS. 14C and 14D show increased % of E7-tetramer+ CD8 are CD62Llo, when mice were immunized with HPV E6/E7 vaccine constructs coformulated with either a STING, IRF3 or IRF7 immune potentiator mRNA construct.

[0107] FIGS. 15A-15B are graphs showing MC38 neoantigen-specific responses by IFN-□ intracellular staining (ICS) of day 21 (FIG. 15A) or day 35 (FIG. 15B) CD8⁺ splenocytes from mice immunized with MC38 neo-antigen vaccine construct (ADRvax) coformulated with either a STING, IRF3 or IRF7 immune potentiator mRNA construct.

[0108] FIGS. 16A-16B are graphs showing the percentage of CD8b⁺ cells among live CD45⁺ cells in spleen or PBMCs (FIG. 16A) or the percentage of CD62L^{lo} cells among CD8b⁺ cell in spleen or PBMCs (FIG. 16B) from mice immunized with MC38 neoantigen vaccine construct (ADRvax) coformulated with either a STING, IRF3 or IRF7 immune potentiator mRNA construct.

[0109] FIG. 17 is a graph showing antibody titer comparisons from mice treated with the indicated bacterial antigen mRNA constructs alone (at 0.2 μg) or treated with the bacterial peptide mRNA construct coformulated with a STING immune potentiator mRNA construct.

[0110] FIG. 18 depicts NRAS and KRAS mutation frequency in colorectal cancer as identified using cBioPortal.

[0111] FIGS. 19A-19C are graphs showing tumor volume from mice treated prophylactically as indicated with HPV E6/E7 construct together with a STING immune potentiator mRNA construct (alone or in combination with anti-CTLA-4 or anti-PD1 treatment on day 6, 9, and 12), either prior to or at the time of challenge with a TC1 tumor that expresses HPV E7, showing inhibition of tumor growth by the HPV E6/E7+STING treatment. Certain mice were treated on days −14 and −7 with soluble E6/E7+STING (FIG. 19A) or with intracellular E6/E7+STING (FIG. 19B), with tumor challenge on day 1. Other mice were treated on days 1 and 8 with soluble E6/E7+STING (FIG. 19C), with tumor challenge on day 1.

[0112] FIGS. 20A-20I are graphs showing tumor volume from mice treated therapeutically as indicated with HPV E6/E7 construct together with a STING immune potentiator mRNA construct (FIG. 20A), alone or in combination with anti-CTLA-4 treatment on day 13, 16 and 19 (FIG. 20B) or anti-PD1 treatment on day 13, 16 and 19 (FIG. 20C), after challenge with a TC1 tumor that expresses HPV E7, showing inhibition of tumor growth by the HPV E6/E7+STING treatment. FIGS. 20D-20I show treatments with murine STING ligand DMXAA.

[0113] FIG. 21 provides graphs showing tumor volume from mice treated therapeutically as indicated with HPV E6/E7 construct together with a STING immune potentiator mRNA construct in mice bearing tumors of 200 mm³ volume size (upper graphs) or 300 mm³ volume size (lower graphs).

[0114] FIG. 22 is a graph showing intracellular staining (ICS) of CD8⁺ splenocytes for IFN-γ from mice immunized with an ADR vaccine construct coformulated with a STING immune potentiator at the indicated Ag:STING ratios on day 21 post first immunization. CD8+ cells were restimulated with either the mutant ADR antigen composition (comprising three peptides) or the wild-type ADR composition (as a control).

[0115] FIG. 23 is a graph showing intracellular staining (ICS) of CD8⁺ splenocytes for TNF-α from mice immunized with an ADR vaccine construct coformulated with a STING immune potentiator at the indicated Ag:STING ratios on day 21 post first immunization. CD8+ cells were restimulated with either the mutant ADR antigen composition (comprising three peptides) or the wild-type ADR composition (as a control).

[0116] FIGS. 24A-24C are graphs showing intracellular staining (ICS) of CD8⁺ splenocytes for IFN-γ from mice immunized with an ADR vaccine construct coformulated with a STING immune potentiator at the indicated Ag:STING ratios on day 21 post first immunization. CD8+ cells were restimulated with either a mutant or wild-type (as a control) peptide contained within the ADR antigen composition. FIG. 24A shows responses to the Adpk1 peptide within the ADR composition. FIG. 24B shows the response to the Reps1 peptide within the ADR composition. FIG. 24C shows the response to the Dpagt1 peptide within the ADR composition.

[0117] FIG. 25 is a graph showing antigen-specific T cell responses to MHC class I epitopes within the CA-132 vaccine, as measured by ELISpot analysis for IFN-γ, from mice treated with a coformulation of CA-132 and STING immune potentiator, at the indicated different Ag:STING ratios.

[0118] FIG. 26 is a bar graph showing antigen-specific T cell responses to MHC class I epitopes within the CA-132 vaccine, following restimulation with the CA-87 peptide, as measured by ELISpot analysis for IFN-γ, from mice treated with a coformulation of CA-132 and STING immune potentiator, at the indicated different Ag: STING ratios.

[0119] FIG. 27 is a graph showing intracellular staining (ICS) of CD8⁺ splenocytes for IFN-γ from mice immunized with an HPV16 E7 vaccine construct coformulated with a STING immune potentiator at the indicated Ag:STING ratios on day 21 post first immunization.

[0120] FIGS. 28A-28C are bar graphs showing TNF□ intracellular staining (ICS) results for CD8+ T cells from cynomolgus monkeys treated with HPV vaccine+STING constructs, followed by ex vivo stimulation with either HPV16 E6 peptide pool (FIG. 28A), HPV16 E7 peptide pool (FIG. 28B) or medium (negative control) (FIG. 28C).

[0121] FIGS. 29A-29C are bar graphs showing IL-2 intracellular staining (ICS) results for CD8+ T cells from cynomolgus monkeys treated with HPV vaccine+STING constructs, followed by ex vivo stimulation with either HPV16 E6 peptides (FIG. 29A), HPV16 E7 peptides (FIG. 29B) or medium (negative control) (FIG. 29C).

[0122] FIG. 30 is a graph showing ELISA results for anti-E6 IgG in serum from cynomolgus monkeys treated with HPV vaccine+STING constructs.

[0123] FIG. 31 is a graph showing ELISA results for anti-E7 IgG in serum from cynomolgus monkeys treated with HPV vaccine+STING constructs.

[0124] FIG. 32 is a graph showing the intracellular staining (ICS) results for CD8+ splenocytes for IFN-γ from mice immunized with mutant KRAS vaccine+STING construct followed by ex vivo stimulation with KRAS-G12V peptide.

[0125] FIG. 33 is a graph showing the intracellular staining (ICS) results for CD8+ splenocytes for IFN-γ from mice immunized with mutant KRAS vaccine+STING construct followed by ex vivo stimulation with KRAS-G12D peptide.

[0126] FIG. 34 is a graph showing the intracellular staining (ICS) results or CD8+ splenocytes for IFN-γ from mice immunized with mutant KRAS vaccine+STING construct followed by ex vivo co-culture with Cos7-A11 cells pulsed with KRAS-G12V.

[0127] FIG. 35 is a graph showing the intracellular staining (ICS) results or CD8+ splenocytes for IFN-γ from mice immunized with mutant KRAS vaccine+STING construct followed by ex vivo co-culture with Cos7-A11 cells pulsed with KRAS-G12D.

[0128] FIG. 36 is a graph showing the intracellular staining (ICS) results or CD8+ splenocytes for IFN-γ from mice immunized with an A11 viral epitope concatemer with STING or with nontranslatable mRNA control (NTFIX) constructs followed by ex vivo stimulation with individual viral epitopes.

[0129] FIGS. 37A-37B are graphs showing intracellular staining (ICS) of CD8⁺ splenocytes from mice immunized with HPV vaccine constructs coformulated with either STING, IRF3/IRF7 or IRF3/IRF7/IKKβ immune potentiator mRNA constructs on day 21 post first immunization. FIG. 37A shows E7-specific responses for IFN-γ ICS. FIG. 37B shows E7-specific responses for TNF-α ICS.

[0130] FIGS. 38A-38C are graphs showing intracellular staining (ICS) of CD8⁺ splenocytes from mice immunized with OVA antigen coformulated with either STING, TAK1, TRAM or MyD88 immune potentiator mRNA constructs on day 25 post first immunization. FIG. 38A shows OVA-specific responses for IFN-γ ICS. FIG. 38B shows OVA-specific responses for TNF-α ICS. FIG. 38C shows OVA-specific responses for IL-2 ICS.

[0131] FIG. 39 is a bar graph showing intracellular staining (ICS) of CD8⁺ splenocytes for IFN-γ from mice immunized with OVA antigen coformulated with either STING, MAVS, IKKβ, Caspase 1+Caspase 4+IKKβ, MLKL or MLKL+STING immune potentiator mRNA constructs on day 21 post first immunization. DMXAA, a chemical activator of STING, was used as a comparator.

[0132] FIG. 40 is a bar graph showing intracellular staining (ICS) of CD8⁺ splenocytes for IFN-γ from mice immunized with OVA antigen coformulated with either STING, MAVS, IKKβ, Caspase 1+Caspase 4+IKKβ, MLKL or MLKL+STING immune potentiator mRNA constructs on day 50 post first immunization. DMXAA, a chemical activator of STING, was used as a comparator.

[0133] FIGS. 41A-41B are bar graphs showing intracellular staining (ICS) of CD8⁺ splenocytes for IFN-γ from mice immunized with OVA antigen coformulated or coadministered with the indicated constitutively active STING mutant constructs. FIG. 41A shows day 21 post immunization. FIG. 41B shows day 90 post first immunization.

[0134] FIGS. 42A-42B are bar graphs showing intracellular staining (ICS) of CD8⁺ splenocytes for IFN-γ from CD4-depleted mice immunized with HPV vaccine constructs coformulated with a STING immune potentiator mRNA construct. FIG. 42A shows day 21 post first immunization. FIG. 42B shows day 50 post first immunization.

[0135] FIG. 43 provides graphs showing tumor volume in mice bearing TC1 HPV tumors treated with an HPV-STING vaccine either alone or in combination with anti-CD4 (to deplete CD4 T cells) or anti-CD8 (to deplete CD8 T cells).

[0136] FIGS. 44A-44B are graphs showing the percentage of CD62L^{lo} cells among CD4^{hi}CD8⁺ cells from spleens of mice immunized with MC38 antigen vaccine construct coformulated with a STING immune potentiator mRNA construct at the indicated Ag and STING dosages. FIG. 44A shows results for day 21 spleen cells. FIG. 44B shows the results for day 54 spleen cells.

[0137] FIG. 45 is a bar graph showing antigen-specific IFN-γ T cell responses from mice immunized with mRNA encoding a concatemeric of 20 murine epitopes (CA-132) in combination with a STING immunopotentiator mRNA, as compared to standard adjuvants, or unformulated (not encapsulated in LNP). Data shown is for in vitro peptide restimulation with Class II epitopes (CA-82 and CA-83) encoded within the concatemer.

[0138] FIG. 46 is a bar graph showing antigen-specific IFN-γ T cell responses from mice immunized with mRNA encoding a concatemeric of 20 murine epitopes (CA-132) in combination with a STING immunopotentiator mRNA, as compared to standard adjuvants, or unformulated (not encapsulated in LNP). Data shown is for in vitro peptide restimulation with Class I epitopes (CA-87, CA-90 and CA-93) encoded within the concatemer.

[0139] FIG. 47 is a bar graph showing antigen-specific IFN-γ T cell responses from mice immunized with mRNA encoding a concatemeric of 20 murine epitopes (CA-132) in combination with a STING immunopotentiator mRNA, wherein the STING construct was administered either simultaneously with the vaccine, 24 hours later or 48 hours later. Data shown is for in vitro peptide restimulation with either Class II epitopes (CA-82 and CA-83) or Class I epitopes (CA-87, CA-90 and CA-93) encoded within the concatemer.

[0140] FIG. 48 shows antigen-specific responses from mice immunized with mRNA encoding a concatemeric of 52 murine epitopes in combination with a STING immunopotentiator mRNA at varying Ag and STING dosages and Ag:STING ratios. Data shown is for in vitro restimulation with the peptide sequence corresponding to the Class II epitope CA-82, encoded within the concatemer.

[0141] FIG. 49 shows antigen-specific responses from mice immunized with mRNA encoding a concatemeric of 52 murine epitopes in combination with a STING immunopotentiator mRNA at varying Ag and STING dosages and Ag:STING ratios. Data shown is for in vitro restimulation with the peptide sequence corresponding to the Class II epitope CA-83, encoded within the concatemer.

[0142] FIG. 50 shows antigen-specific responses from mice immunized with mRNA encoding a concatemeric of 52 murine epitopes in combination with a STING immunopotentiator mRNA at varying Ag and STING dosages and Ag:STING ratios. Data shown is for in vitro restimulation with the peptide sequence corresponding to Class I epitope CA-87, encoded within the concatemer.

[0143] FIG. 51 shows antigen-specific responses from mice immunized with mRNA encoding a concatemeric of 52 murine epitopes in combination with a STING immunopotentiator mRNA at varying Ag and STING dosages and Ag:STING ratios. Data shown is for in vitro restimulation with the peptide sequence corresponding to Class I epitope CA-93, encoded within the concatemer.

[0144] FIG. 52 shows antigen-specific responses from mice immunized with mRNA encoding a concatemeric of 52 murine epitopes in combination with a STING immunopotentiator mRNA at varying Ag and STING dosages and Ag:STING ratios. Data shown is for in vitro restimulation with the peptide sequence corresponding to Class I epitope CA-113, encoded within the concatemer.

[0145] FIG. 53 shows antigen-specific responses from mice immunized with mRNA encoding a concatemeric of 52 murine epitopes in combination with a STING immunopotentiator mRNA at varying Ag and STING dosages and Ag:STING ratios. Data shown is for in vitro restimulation with the peptide sequence corresponding to Class II epitope CA-90, encoded within the concatemer.

[0146] FIG. 54 is a bar graph showing cell viability of Hep3B cells transfected with MLKL 1-180 mRNA constructs, as measured using the CellTiter-Glo® Luminescent Cell Viability Assay.

[0147] FIG. 55 is a graph showing cell viability of Hep3B cells transfected with MLKL 1-180 mRNA constructs, as measured using the YOYO-3® cell viability read-out.

[0148] FIG. 56 is a graph showing ATP release from Hep3B cells transfected with MLKL 1-180 mRNA constructs, indicating necroptosis.

[0149] FIG. 57 is a graph showing HMGB1 release from HeLa cells transfected with MLKL 1-180 mRNA constructs, indicating necroptosis.

[0150] FIG. 58 is a graph showing cell surface staining of calreticulin on cells either mock transfected, transfected with an apoptosis-inducing construct (“PUMA”) or transfected with an MLKL construct, indicating necroptosis by the MLKL construct.

[0151] FIGS. 59A-59C are bar graphs showing cell viability of HeLa cells (FIG. 59A), B16F10 cells (FIG. 59B) or MC38 cells (FIG. 59C) transfected with MLKL, GSDMD or RIP3K mRNA constructs, as measured using the CellTiter-Glo® Luminescent Cell Viability Assay. *p<0.05; ***p<0.001 vs L2K ##p<0.01 vs HsMLKL (1-180).

[0152] FIG. 60 is a bar graph showing induction of death in NIH3T3 cells transfected with multimerizing RIPK3 mRNA constructs.

[0153] FIG. 61 is a bar graph showing induction of DAMP release (HMGB1 release) in B16F10 cells transfected with a multimerizing RIPK3 construct, indicating necroptosis.

[0154] FIG. 62 is a bar graph showing cell viability of SKOV3 cells transfected with DIABLO mRNA constructs, as measured using the CellTiter-Glo® Luminescent Cell Viability Assay.

[0155] FIG. 63 is a bar graph showing induction of cell death in HeLa cells transfected with caspase-4, caspase-5 or caspase-11 mRNA constructs. Results show mean±SEM from four independent experiments.

[0156] FIG. 64 is a bar graph showing induction of cell death in HeLa cells transfected with NLRP3, Pyrin or ASC mmRNA constructs. Results show mean±SEM from four independent experiments.

[0157] FIGS. 65A-65B are bar graphs showing activation of an interferon-sensitive response element (ISRE) by constitutively active IRF3 constructs (FIG. 65A) or IRF7 constructs (FIG. 65B).

[0158] FIG. 66 is a schematic illustration of the study design for the experimental results shown in FIG. 67.

[0159] FIG. 67 is a bar graph showing release of IL-18 by HeLa cells primed with an immune potentiator, as indicated, and transfected with a caspase-4, caspase-5 or caspase-11 construct, as indicated.

[0160] FIGS. 68A-68K are graphs showing the effect of treatment with the indicated executioner mRNA constructs, alone or in combination with the indicated immune checkpoint inhibitor, on growth of MC38 tumors in mice.

[0161] FIGS. 69A-69B are graphs showing the effect of treatment with the indicated executioner mRNA constructs, alone or in combination with the indicated immune potentiator and/or immune checkpoint inhibitor, on growth of MC38 tumors in mice (FIG. 69A) and on percent survival of mice (FIG. 69B).

[0162] FIGS. 70A-70B are graphs showing the effect of treatment with a STING mRNA construct in combination with anti-PD-1, as compared to vehicle alone or NT control+anti-PD-1, on growth of MC38 tumors in mice (FIG. 70A) and on percent survival of mice (FIG. 70B).

### DETAILED DESCRIPTION

[0163] The present disclosure provides compositions such as mRNAs constructs encoding a polypeptide that enhances immune responses to an antigen of interest, referred to herein as immune potentiator mRNA constructs or immune potentiator mRNAs, including chemically modified mRNAs (mmRNAs). The immune potentiator mRNAs of the disclosure enhance immune responses by, for example, activating Type I interferon pathway signaling, stimulating NFkB pathway signaling, or both, such that antigen-specific responses to an antigen of interest are stimulated. The immune potentiator mRNAs of the disclosure enhance immune responses to an endogenous antigen in a subject to which the immune potentiator mRNA is administered or enhance immune responses to an exogenous antigen that is administered to the subject with the immune potentiator mRNA (e.g., an mRNA construct encoding an antigen of interest that is coformulated and coadministered with the immune potentiator mRNA or an mRNA construct encoding an antigen of interest that is formulated and administered separately from the immune potentiator mRNA).

[0164] Surprisingly, it has been discovered that administration of an immune potentiator mRNA of the disclosure (e.g., an mRNA encoding a constitutively active STING polypeptide) or combination of immune potentiator mRNAs to a subject stimulates cytokine production (e.g., inflammatory cytokine production), stimulates antigen-specific CD8⁺ effector cell responses, stimulates antigen-specific CD4⁺ helper cell responses, increases the effector memory CD62L^{lo} T cell population and stimulates antigen-specific antibody production to an antigen of interest.

[0165] As described in detail in the examples, it has been found that administration of an immune potentiator mRNA construct (or combination of immune potentiator mRNAs) increases the percentage of CD8+ T cells that are positive by ICS for one or more cytokines (e.g., IFN-γ, TNFα and/or IL-2) in response to an antigen and increases the percentage of CD8+ T cells among the total T cell population (e.g., Example 5 and FIGS. 8-12). Remarkably, these effects were durable, as the higher percentage of antigen-specific CD8⁺ T cells positive by ICS for one or more cytokines was maintained for up to 7 weeks in vivo (FIG. 11). It was also found that administration of an immune potentiator mRNA construct (or combination of immune potentiator mRNAs) increases the effector memory CD62L^{lo} T cell population (e.g., Examples 5, 6, and Example 19), and that this effect is maintained over time (Example 19 and FIG. 44). Importantly, potentiation of antigen-specific T cell responses and antibody responses to an mRNA vaccine was also demonstrated in non-human primates (e.g., Example 12 and FIGS. 28-31).

[0166] In the context of a bacterial vaccine, it has been shown that administration of an immune potentiator mRNA construct enhances humoral response to a bacterial vaccine by increasing antigen-specific antibody responses in vivo (e.g., Example 7 and FIG. 17).

[0167] In the context of a cancer vaccine, administration of an immune potentiator mRNA construct was shown to result in a robust and durable immune response against cancer neoepitopes (Example 6) and was shown to potently inhibit tumor growth in prophylactic and therapeutic vaccination with an oncogenic viral vaccine (Example 10). For example, administration of an immune potentiator mRNA with an HPV vaccine was effective (alone or in combination with a checkpoint inhibitor) in preventing growth of HPV-expressing tumor cells in vivo (FIG. 19) and therapeutic vaccination (i.e., subsequent to tumor challenge) with the HPV vaccine together with the immune potentiator mRNA (alone or in combination with a checkpoint inhibitor) was effective in inducing regression of HPV-expressing tumors in vivo (FIG. 20). Notably, administration of an immune potentiator mRNA with the therapeutic vaccine also exhibited efficacy in inhibiting large, established tumors in vivo (FIG. 21).

[0168] In the context of a personalized cancer vaccine, it has been shown that administration of an immune potentiator mRNA construct enhances antigen-specific T cell responses and antibody responses to an mRNA encoding a personalized cancer vaccine (a concatemer) inducing both Class I and Class II MCH responses (e.g., Example 20 and FIGS. 45-53). Administration of an immune potentiator mRNA was also found to potentiate immune responses to mRNA encoding KRAS cancer antigens in various formats (monomers and concatemer) (e.g., Example 13 and FIGS. 32-36).

[0169] It has also been demonstrated that combinations of immune potentiator mRNAs encoding Type I interferon inducers and NFκB activators (e.g., Example 14 and FIG. 37), as well as immune potentiator mRNAs encoding components of intracellular signaling pathways that function downstream of TLRs (e.g., Example 15 and FIG. 38) potentiate antigen-specific T cell responses. Additional combinations of immune potentiator mRNAs encoding adaptor proteins (e.g., STING or MAVS), NFκB activators (e.g., IKKβ), inductors of inflammasome (e.g., caspases 1/4) and inductors of necroptosome (e.g., MLKL) were also shown to potentiate antigen-specific T cell responses. Surprisingly, the combination of an mRNA encoding an adaptor protein (e.g., STING) and an mRNA encoding an inducer of necroptosome (e.g., MLKL) exhibited enhanced activity as compared to an mRNA encoding MLKL alone (e.g., Example 16 and FIG. 39-40). The day 90 results demonstrate the immune potentiation effect was durable (e.g., Example 18 and FIG. 41).

[0170] Unexpectedly, it was found that the addition of an mRNA encoding an immune potentiator (e.g., STING) across a majority of antigen to immune potentiator (Ag:IP) ratios improved antigen-specific T cell responses compared to antigen alone (e.g., Example 20). The breadth of responsiveness was unexpected. For four of six antigens (epitopes) tested, the addition of an mRNA encoding an immune potentiator to antigen consistently produced higher T cell responses than antigen alone. Thus, it was discovered that there is a wide bell curve in the ratio of antigen to immune potentiator for improved immunogenicity.

[0171] It was also discovered that the addition of an mRNA encoding an immune potentiator (e.g., STING) across all antigens tested potentiates the immune response to the antigen relative to antigen alone. In most situations, at least a 2-fold increase in immune potentiation was found and, for certain antigens, an even greater enhancement of immune potentiation resulted (e.g., more than 5-fold, more than 10-fold, more than 20-fold, more than 30-fold, more than 50-fold, or more than 75-fold enhancement) (e.g., Example 21).

[0172] Accordingly, the present disclosure provides compositions comprising one or more mRNA constructs (e.g., one or more mmRNA constructs), wherein the one or more mRNA constructs encode an antigen(s) of interest and, in the same or a separate mRNA construct, encode a polypeptide that enhances an immune response to the antigen of interest. In some aspects, the disclosure provides nanoparticles, e.g., lipid nanoparticles, which include an immune potentiator mRNA that enhances an immune response, alone or in combination with mRNAs that encode an antigen of interest. The disclosure also provides pharmaceutical compositions comprising any of the mRNAs as described herein or nanoparticles, e.g., lipid nanoparticles comprising any of the mRNAs as described herein.

[0173] In another aspect, the disclosure provides compositions comprising one or more mRNA constructs (e.g., one or more mmRNA constructs) that encode a polypeptide that induces immunogenic cell death, such as necroptosis or pyroptosis. Such mRNA constructs can be used in combination with an immune potentiator mRNA construct of the disclosure to enhance the release of endogenous antigens in vivo to thereby stimulate an immune response against the endogenous antigens. In some aspects, the disclosure provides nanoparticles, e.g., lipid nanoparticles, which include an immunogenic cell death-inducing mRNA, alone or in combination with an immune potentiator mRNA. The disclosure also provides pharmaceutical compositions comprising any of the mRNAs as described herein or nanoparticles, e.g., lipid nanoparticles comprising any of the mRNAs as described herein.

[0174] In other aspects, the disclosure provides methods for enhancing an immune response to an antigen(s) of interest by administering to a subject an immune potentiator mRNA construct alone (for endogenous antigens) or by administering one or more mRNAs encoding an antigen(s) of interest and a mRNA encoding a polypeptide that enhances an immune response to the antigen(s) of interest, or lipid nanoparticle thereof, or pharmaceutical composition thereof, such that an immune response to the antigen of interest is enhanced in the subject. The methods of enhancing an immune response can be used, for example, to stimulate an immunogenic response to a tumor in a subject, to stimulate an immunogenic response to a pathogen in a subject or to enhance immune responses to a vaccine in a subject.

Immune Potentiator mRNAs

[0175] One aspect of the disclosure pertains to mRNAs that encode a polypeptide that stimulates or enhances an immune response against one or more antigens of interest. Such mRNAs that enhance immune responses to an antigen(s) of interest are referred to herein as immune potentiator mRNA constructs or immune potentiator mRNAs, including chemically modified mRNAs (mmRNAs). An immune potentiator of the disclosure enhances an immune response to an antigen of interest in a subject. The enhanced immune response can be a cellular response, a humoral response or both. As used herein, a “cellular” immune response is intended to encompass immune responses that involve or are mediated by T cells, whereas a “humoral” immune response is intended to encompass immune responses that involve or are mediated by B cells. An immune potentiator may enhance an immune response by, for example,

[0176] (i) stimulating Type I interferon pathway signaling;

[0177] (ii) stimulating NFkB pathway signaling;

[0178] (iii) stimulating an inflammatory response;

[0179] (iv) stimulating cytokine production; or

[0180] (v) stimulating dendritic cell development, activity or mobilization; and

[0181] (vi) a combination of any of (i)-(vi).

[0182] As used herein, “stimulating Type I interferon pathway signaling” is intended to encompass activating one or more components of the Type I interferon signaling pathway (e.g., modifying phosphorylation, dimerization or the like of such components to thereby activate the pathway), stimulating transcription from an interferon-sensitive response element (ISRE) and/or stimulating production or secretion of Type I interferon (e.g., IFN-α, IFN-β, IFN-ε, IFN-κ and/or IFN-ω). As used herein, “stimulating NFkB pathway signaling” is intended to encompass activating one or more components of the NFkB signaling pathway (e.g., modifying phosphorylation, dimerization or the like of such components to thereby activate the pathway), stimulating transcription from an NFkB site and/or stimulating production of a gene product whose expression is regulated by NFkB. As used herein, “stimulating an inflammatory response” is intended to encompass stimulating the production of inflammatory cytokines (including but not limited to Type I interferons, IL-6 and/or TNFα). As used herein, “stimulating dendritic cell development, activity or mobilization” is intended to encompass directly or indirectly stimulating dendritic cell maturation, proliferation and/or functional activity.

[0183] In certain embodiments, the immune potentiator mRNA construct enhances an immune response to an antigen of interest by a fold magnitude, e.g., relative to the immune response to the antigen in the absence of the immune potentiator, or relative to a small molecular agonist that enhances an immune response to the antigen. For example, in various embodiments, the immune potentiator mRNA construct enhances an immune response to an antigen of interest at least 2-fold, 3-fold, 4-fold, 5-fold, 7.5-fold, 10-fold, 20-fold, 30-fold, 40-fold, 50-fold, 75-fold, or greater, as compared to, for example, the immune response to the antigen in the absence of the immune potentiator mRNA construct or as compared to, for example, the immune response to the antigen in the presence of a small molecular agonist of an immune response to the antigen. In some embodiments, the immune potentiator mRNA construct enhance an immune response to an antigen of antigerest by 0.3-1000 fold, 1-750 fold, 5-500 fold, 7-250 fold, or 10-100 fold, as compared to, for example, the immune response to the antigen in the absence of the immune potentiator mRNA construct or as compared to, for example, the immune response to the antigen in the presence of a small molecular agonist of an immune response to the antigen. The fold magnitude enhancement of an immune potentiator construct can be measured using standard methods known in the art (e.g., as described in the Examples). For example, the level of antigen-specific T cells expressing inflammatory cytokines (e.g., IFN-γ and/or TNF-α) can be assessed by, e.g., intracellular staining (ICS) or by ELISpot analysis, as described in the Examples.

[0184] In some aspects, the disclosure provides an mRNA encoding a polypeptide that stimulates or enhances an immune response in a subject in need thereof (e.g., potentiates an immune response in the subject) by, for example, inducing adaptive immunity (e.g., by stimulating Type I interferon production), stimulating an inflammatory response, stimulating NFkB signaling and/or stimulating dendritic cell (DC) development, activity or mobilization in the subject. In some aspects, administration of an immune potentiator mRNA to a subject in need thereof enhances cellular immunity (e.g., T cell-mediated immunity), humoral immunity (e.g., B cell-mediated immunity) or both cellular and humoral immunity in the subject. In some aspects, administration of an immune potentiator mRNA stimulates cytokine production (e.g., inflammatory cytokine production), stimulates antigen-specific CD8⁺ effector cell responses, stimulates antigen-specific CD4⁺ helper cell responses, increases the effector memory CD62L^{lo} T cell population, stimulates B cell activity or stimulates antigen-specific antibody production, including combinations of the foregoing responses. In some aspects, administration of an immune potentiator mRNA stimulates cytokine production (e.g., inflammatory cytokine production) and stimulates antigen-specific CD8⁺ effector cell responses. In some aspects, administration of an immune potentiator mRNA stimulates cytokine production (e.g., inflammatory cytokine production), and stimulates antigen-specific CD4⁺ helper cell responses. In some aspects, administration of an immune potentiator mRNA stimulates cytokine production (e.g., inflammatory cytokine production), and increases the effector memory CD62L^{lo} T cell population. In some aspects, administration of an immune potentiator mRNA stimulates cytokine production (e.g., inflammatory cytokine production), and stimulates B cell activity or stimulates antigen-specific antibody production.

[0185] In one embodiment, an immune potentiator increases antigen-specific CD8⁺ effector cell responses (cellular immunity). For example, an immune potentiator can increase one or more indicators of antigen-specific CD8⁺ effector cell activity, including but not limited to CD8+ T cell proliferation and CD8+ T cell cytokine production. For example, in one embodiment, an immune potentiator increases production of IFN-γ, TNFα and/or IL-2 by antigen-specific CD8+ T cells. In various embodiments, an immune potentiator can increase CD8+ T cell cytokine production (e.g., IFN-γ, TNFα and/or IL-2 production) in response to an antigen (as compared to CD8+ T cell cytokine production in the absence of the immune potentiator) by at least 5% or at least 10% or at least 15% or at least 20% or at least 25% or at least 30% or at least 35% or at least 40% or at least 45% or at least 50%. For example, T cells obtained from a treated subject can be stimulated in vitro with the antigen of interest and CD8+ T cell cytokine production can be assessed in vitro. CD8+ T cell cytokine production can be determined by standard methods known in the art, including but not limited to measurement of secreted levels of cytokine production (e.g., by ELISA or other suitable method known in the art for determining the amount of a cytokine in supernatant) and/or determination of the percentage of CD8+ T cells that are positive for intracellular staining (ICS) for the cytokine. For example, intracellular staining (ICS) of CD8+ T cells for expression of IFN-γ, TNFα and/or IL-2 can be carried out by methods known in the art (see e.g., the Examples). In one embodiment, an immune potentiator increases the percentage of CD8+ T cells that are positive by ICS for one or more cytokines (e.g., IFN-γ, TNFα and/or IL-2) in response to an antigen (as compared to the percentage of CD8+ T cells that are positive by ICS for the cytokine(s) in the absence of the immune potentiator) by at least 5% or at least 10% or at least 15% or at least 20% or at least 25% or at least 30% or at least 35% or at least 40% or at least 45% or at least 50%.

[0186] In yet another embodiment, an immune potentiator increases the percentage of CD8+ T cells among the total T cell population (e.g., splenic T cells and/or PBMCs), as compared to the percentage of CD8+ T cells in the absence of the immune potentiator. For example, an immune potentiator can increase the percentage of CD8+ T cells among the total T cell population by at least 5% or at least 10% or at least 15% or at least 20% or at least 25% or at least 30% or at least 35% or at least 40% or at least 45% or at least 50%, as compared to the percentage of CD8+ T cells in the absence of the immune potentiator. The total percentage of CD8+ T cells among the total T cell population can be determined by standard methods known in the art, including but not limited to fluorescent activated cell sorting (FACS) or magnetic activated cell sorting (MACS).

[0187] In another embodiment, an immune potentiator increases a tumor-specific immune cell response, as determined by a decrease in tumor volume in vivo in the presence of the immune potentiator as compared to tumor volume in the absence of the immune potentiator. For example, an immune potentiator can decrease tumor volume by at least 5% or at least 10% or at least 15% or at least 20% or at least 25% or at least 30% or at least 35% or at least 40% or at least 45% or at least 50%, as compared to tumor volume in the absence of the immune potentiator. Measurement of tumor volume can be determined by methods well established in the art.

[0188] In another embodiment, an immune potentiator increases B cell activity (humoral immune response), for example by increasing the amount of antigen-specific antibody production, as compared to antigen-specific aantibody production in the absence of the immune potentiator. For example, an immune potentiator can increase antigen-specific antibody production by at least 5% or at least 10% or at least 15% or at least 20% or at least 25% or at least 30% or at least 35% or at least 40% or at least 45% or at least 50%, as compared to antigen-specific antibody production in the absence of the immune potentiator. In one embodiment, antigen-specific IgG production is evaluated. Antigen-specific antibody production can be evaluated by methods well established in the art, including but not limited to ELISA, RIA and the like that measure the level of antigen-specific antibody (e.g., IgG) in a sample (e.g., a serum sample).

[0189] In another embodiment, an immune potentiator increases the effector memory CD62L^{lo} T cell population. For example, an immune potentiator can increase the total % of CD62L^{lo} T cells among CD8+ T cells. Among other functions, the effector memory CD62L^{lo} T cell population has been shown to have an important function in lymphocyte trafficking (see e.g., Schenkel, J. M. and Masopust, D. (2014) Immunity 41:886-897). In various embodiments, an immune potentiator can increase the total percentage of effector memory CD62L^{lo} T cells among the CD8+ T cells in response to an antigen (as compared to the total percentage of CD62L^{lo} T cells among the CD8+ T cells population in the absence of the immune potentiator) by at least 5% or at least 10% or at least 15% or at least 20% or at least 25% or at least 30% or at least 35% or at least 40% or at least 45% or at least 50%. The total percentage of effector memory CD62L^{lo} T cells among the CD8+ T cells can be determined by standard methods known in the art, including but not limited to fluorescent activated cell sorting (FACS) or magnetic activated cell sorting (MACS).

[0190] The ability of an immune potentiator mRNA construct to enhance an immune response to an antigen of interest has been shown to be durable, with enhanced immunogenicity observed for extended periods of time, e.g., as long as 90 days. Accordingly, in various embodiments, an immune potentiator mRNA construct can enhance antigen-specific immune responses for at least 2 weeks, at least 3 weeks, at least 4 weeks, ate least one month, at least 5 weeks, at least 6 weeks, at least 7 weeks, at least 8 weeks, at least 9 weeks, at least 10 weeks, at least 11, weeks, at least 12 weeks, at least one month, at least 2 months or at least 3 months, or longer.

[0191] The ability of an immune potentiator mRNA construct to enhance an immune response to an antigen of interest can be evaluated in mouse model systems known in the art. In one embodiment, an immune competent mouse model system is used. In one embodiment, the mouse model system comprises C57/Bl6 mice (e.g., to evaluate antigen-specific CD8+ T cell responses to an antigen of interest, such as described in the Examples). In another embodiment, the mouse model system comprises BalbC mice or CD1 mice (e.g., to evaluate B cell responses, such an antigen-specific antibody responses).

[0192] In some embodiments, an immune potentiator polypeptide of the disclosure functions downstream of at least one Toll-like receptor (TLR) to thereby enhance an immune response. Accordingly, in one embodiment, the immune potentiator is not a TLR but is a molecule within a TLR signaling pathway downstream from the receptor itself.

[0193] In some embodiments, the polypeptide stimulates a Type I interferon (IFN) response. Non-limiting examples of polypeptides that stimulate a Type I IFN response that are suitable for use as an immune potentiator include STING, MAVS, IRF1, IRF3, IRF5, IRF7, IRF8, IRF9, TBK1, IKKα, IKKi, MyD88, TRAM, TRAF3, TRAF6, IRAK1, IRAK4, TRIF, IPS-1, RIG-1, DAI and IFI16. Specific examples of polypeptides that stimulate a Type I interferon (IFN) response are described further below.

[0194] In another embodiment, the polypeptide stimulates an NFκB-mediated proinflammatory response. Non-limiting examples of polypeptides that stimulate an NFκB-mediated proinflammatory response include STING, c-FLIP, IKKβ, RIPK1, Btk, TAK1, TAK-TAB1, TBK1, MyD88, IRAK1, IRAK2, IRAK4, TAB2, TAB3, TRAF6, TRAM, MKK3, MKK4, MKK6 and MKK7. Specific examples of polypeptides that stimulate an NFκB-mediated proinflammatory response are described further below.

[0195] In another embodiment, the polypeptide is an intracellular adaptor protein. In one embodiment, the intracellular adaptor protein stimulates a Type I IFN response. In another embodiment, the intracellular adaptor protein stimulates an NFκB-mediated proinflammatory response. Non-limiting examples of intacellular adaptor proteins include STING, MAVS and MyD88. Specific examples of intracellular adaptor proteins are described further below.

[0196] In another embodiment, the polypeptide is an intracellular signaling protein. In one embodiment, the polypeptide is an intracellular signaling protein of a TLR signaling pathway. In one embodiment, the intracellular signalling protein stimulates a Type I IFN response. In another embodiment, the intracellular signalling protein stimulates an NFκB-mediated proinflammatory response. Non-limiting examples of intracellular signalling proteins include MyD88, IRAK 1, IRAK2, IRAK4, TRAF3, TRAF6, TAK1, TAB2, TAB3, TAK-TAB1, MKK3, MKK4, MKK6, MKK7, IKKα, IKKβ, TRAM, TRIF, RIPK1, and TBK1. Specific examples of intracellular signaling proteins are described further below.

[0197] In another embodiment, the polypeptide is a transcription factor. In one embodiment, the transcription factor stimulates a Type I IFN response. In another embodiment, the transcription factor stimulates an NFκB-mediated proinflammatory response. Non-limiting examples of transcription factors include IRF3 or IRF7. Specific examples of transcription factors are described further below.

[0198] In another embodiment, the polypeptide is involved in necroptosis or necroptosome formation. A polypeptide is “involved in” necroptosis or necroptosome formation if the protein mediates necroptosis itself or participates with additional molecules in mediating necroptosis and/or in necroptosome formation. Non-limiting examples of polypeptides involved in necroptosis or necroptosome formation include MLKL, RIPK1, RIPK3, DIABLO and FADD. Specific examples of polypeptides involved in necroptosis or necroptosome formation are described further below.

[0199] In another embodiment, the polypeptide is involved in pyroptosis or inflammasome formation. A polypeptide is “involved in” pyroptosis or inflammasome formation if the protein mediates pyroptosis itself or participates with additional molecules in mediating pyroptosis and/or in inflammasome formation. Non-limiting examples of polypeptides involved in pyroptosis or inflammasome formation include caspase 1, caspase 4, caspase 5, caspase 11, GSDMD, NLRP3, Pyrin domain and ASC/PYCARD. Specific examples of polypeptides involved in pyroptosis or inflammasome formation are described further below.

[0200] In some embodiments, an mRNA of the disclosure encoding an immune potentiator can comprises one or more modified nucleobases. Suitable modifications are discussed further below.

[0201] In some embodiments, an mRNA of the disclosure encoding an immune potentiator is formulated into a lipid nanoparticle. In one embodiment, the lipid nanoparticle further comprises an mRNA encoding an antigen of interest. In one embodiment, the lipid nanoparticle is administered to a subject to enhance an immune response against the antigen of interest in the subject. Suitable nanoparticles and methods of use are discussed further below.

[0202] In another embodiment, the disclosure provides compositions that comprise combinations of two or more immune potentiator mRNAs. The two or more immune potentiator mRNAs can be immune potentiators of the same type (e.g., two or more immune potentiators that stimulate a Type I interferon (IFN) response) or can be immune potentiators of different types. Accordingly, in one embodiment, the disclosure provides a composition comprising a first messenger RNA (mRNA) encoding a first polypeptide that enhances an immune response to an antigen of interest in a subject, a second mRNA encoding a second polypeptide that enhances an immune response to an antigen of interest in a subject and, optionally, a third mRNA encoding a third polypeptide that enhances an immune response to an antigen of interest in a subject (and optionally, fourth, fifth, sixth or more mRNAs encoding immune potentiators),

[0203] wherein the immune response comprises a cellular or humoral immune response characterized by:

[0204] (i) stimulating Type I interferon pathway signaling;

[0205] (ii) stimulating NFkB pathway signaling;

[0206] (iii) stimulating an inflammatory response;

[0207] (iv) stimulating cytokine production; or

[0208] (v) stimulating dendritic cell development, activity or mobilization; and

[0209] (vi) a combination of any of (i)-(vi).

[0210] In some embodiments, the first, second and/or, optionally, third polypeptides (and optionally, fourth, fifith, sixth or more polypeptides) function downstream of at least one Toll-like receptor (TLR) to thereby enhance an immune response.

[0211] In various embodiments of the combination compositions:

[0212] (i) the first polypeptide stimulates a Type I interferon (IFN) response and the second polypeptide stimulates an NFκB-mediated proinflammatory response;

[0213] (ii) the first polypeptide stimulates a Type I interferon (IFN) response and the second polypeptide is involved in necroptosis or necroptosome formation;

[0214] (iii) the first polypeptide stimulates a Type I interferon (IFN) response and the second polypeptide is involved in pyroptosis or inflammasome formation;

[0215] (iv) the first polypeptide stimulates an NFκB-mediated proinflammatory response and the second polypeptide is involved in necroptosis or necroptosome formation;

[0216] (v) the first polypeptide stimulates an NFκB-mediated proinflammatory response and the second polypeptide is involved in pyroptosis or inflammasome formation;

[0217] (vii) the first polypeptide stimulates a Type I interferon (IFN) response, the second polypeptide stimulates an NFκB-mediated proinflammatory response and the third polypeptide is involved in necroptosis or necroptosome formation; or

[0218] (viii) the first polypeptide stimulates a Type I interferon (IFN) response, the second polypeptide stimulates an NFκB-mediated proinflammatory response and the third polypeptide is involved in pyroptosis or inflammasome formation.

[0219] Suitable non-limiting examples of each of these categories of immune potentiators are listed above and described in further detail below. All combinations of the listed immune potentiators are contemplated.

[0220] In some embodiments, the first polypeptide stimulates a Type I interferon (IFN) response and is selected from the group consisting of STING, MAVS, IRF1, IRF3, IRF5, IRF7, IRF8, IRF9, TBK1, IKKα, IKKi, MyD88, TRAM, TRAF3, TRAF6, IRAK1, IRAK4, TRIF, IPS-1, RIG-1, DAI and IFI16; and the second polypeptide stimulates an NFκB-mediated proinflammatory response and is selected from the group consisting of STING, c-FLIP, IKKβ, RIPK1, Btk, TAK1, TAK-TAB1, TBK1, MyD88, IRAK1, IRAK2, IRAK4, TAB2, TAB3, TRAF6, TRAM, MKK3, MKK4, MKK6 and MKK7. In some embodiments, the first polypeptide is a constitutively active IRF3 and the second polypeptide is a constitutively active IKKβ. In some embodiments, the composition further comprises an mRNA encoding a constitutively active IRF7 polypeptide (i.e., the composition comprises mRNAs encoding constitutively active IRF3, constitutively active IRF7 polypeptide and constitutively active IKKβ).

[0221] In some embodiments, the first polypeptide stimulates a Type I interferon (IFN) response and is selected from the group consisting of STING, MAVS, IRF1, IRF3, IRF5, IRF7, IRF8, IRF9, TBK1, IKKα, IKKi, MyD88, TRAM, TRAF3, TRAF6, IRAK1, IRAK4, TRIF, IPS-1, RIG-1, DAI and IFI16; and the second polypeptide is involved in necroptosis or necroptosome formation and is selected from the group consisting of MLKL, RIPK1, RIPK3, DIABLO and FADD. In some embodiments, the first polypeptide is a constitutively active STING and the second polypeptide is an MLKL polypeptide.

[0222] In some embodiments, the first polypeptide stimulates an NFκB-mediated proinflammatory response and is selected from the group consisting of STING, c-FLIP, IKKβ, RIPK1, Btk, TAK1, TAK-TAB1, TBK1, MyD88, IRAK1, IRAK2, IRAK4, TAB2, TAB3, TRAF6, TRAM, MKK3, MKK4, MKK6 and MKK7; and the second polypeptide is involved in pyroptosis or inflammasome formation and is selected from the group consisting of caspase 1, caspase 4, caspase 5, caspase 11, GSDMD, NLRP3, Pyrin domain and ASC/PYCARD. In some embodiments, the first polypeptide is a constitutively active IKKβ and the second polypeptide is a caspase-1 polypeptide. In some embodiments, the composition further comprises an mRNA encoding a caspase-4 polypeptide (i.e., the composition comprises mRNAs encoding a constitutively active IKKβ, a caspase-1 polypeptide and a caspase-4 polypeptide).

[0223] In some embodiments, a combination composition of the disclosure encoding two or more immune potentiators comprises one or more mRNAs that comprises one or more modified nucleobases. Suitable modifications are discussed further below.

[0224] In some embodiments, a combination composition of the disclosure encoding two or more immune potentiators is formulatined into a lipid nanoparticle. In some embodiments, the lipid nanoparticle further comprises an mRNA encoding an antigen of interest. In some embodiments, the lipid nanoparticle is administered to a subject to enhance an immune response against the antigen of interest in the subject. Suitable nanoparticles and methods of use are discussed further below.

[0225] Immune Potentiators mRNAs that Stimulate Type I Interferon

[0226] In some aspects, the disclosure provides an immune potentiator mRNA encoding a polypeptide that stimulates or enhances an immune response against an antigen of interest by simulating or enhancing Type I interferon pathway signaling, thereby stimulating or enhancing Type I interferon (IFN) production. It has been established that successful induction of anti-tumor or anti-microbial adaptive immunity requires Type I IFN signaling (see e.g., Fuertes, M. B. et al. (2013) Trends Immunol. 34:67-73). The production of Type I IFNs (including IFN-α, IFN-β, IFN-ε, IFN-κ and IFN-ω) plays a role in clearance of microbial infections, such as viral infections. It has also been appreciated that host cell DNA (for example derived from damaged or dying cells) is capable of inducing Type I interferon production and that the Type I IFN signaling pathway plays a role in the development of adaptive anti-tumor immunity. However, many pathogens and cancer cells have evolved mechanisms to reduce or inhibit Type I interferon responses. Thus, activation (including stimulation and/or enhancement) of the Type I IFN signaling pathway in a subject in need thereof, by providing an immune potentiator mRNA of the disclosure to the subject, stimulates or enhances an immune response in the subject in a wide variety of clinical situations, including treatment of cancer and pathogenic infections, as well as in potentiating vaccine responses to provide protective immunity.

[0227] Type I interferons (IFNs) are pro-inflammatory cytokines that are rapidly produced in multiple different cell types, typically upon viral infection, and known to have a wide variety of effects. The canonical consequences of type I IFN production in vivo is the activation of antimicrobial cellular programs and the development of innate and adaptive immune responses. Type I IFN induces a cell-intrinsic antimicrobial state in infected and neighboring cells that limits the spread of infectious agents, particularly viral pathogens. Type I IFN also modulates innate immune cell activation (e.g., maturation of dendritic cells) to promote antigen presentation and nature killer cell functions. Type I IFN also promotes the development of high-affinity antigen-specific T and B cell responses and immunological memory (Ivashkiv and Donlin (2014) Nat Rev Immunol 14(1):36-49)

[0228] Type I IFN activates dendritic cells (DCs) and promotes their T cell stimulatory capacity through autocrine signaling (Montoya et al., (2002) Blood 99:3263-3271). Type I IFN exposure facilitates maturation of DCs via increasing the expression of chemokine receptors and adhesion molecules (e.g., to promote DC migration into draining lymph nodes), co-stimulatory molecules, and MHC class I and class II antigen presentation. DCs that mature following type I IFN exposure can effectively prime protective T cell responses (Wijesundara et al., (2014) Front Immunol 29(412) and references therein).

[0229] Type I IFN can either promote or inhibit T cell activation, proliferation, differentiation and survival depending largely on the timing of type I IFN signaling relative to T cell receptor signaling (Crouse et al., (2015) Nat Rev Immunol 15:231-242). Early studies revealed that MHC-I expression is upregulated in response to type I IFN in multiple cell types (Lindahl et al., (1976), J Infect Dis 133(Suppl):A66-A68; Lindahl et al., (1976) Proc Natl Acad Sci USA 17:1284-1287) which is a requirement for optimal T cell stimulation, differentiation, expansion and cytolytic activity. Type I IFN can exert potent co-stimulatory effects on CD8 T cells, enhancing CD8 T cell proliferation and differentiation (Curtsinger et al., (2005) J Immunol 174:4465-4469; Kolumam et al., (2005) J Exp Med 202:637-650).

[0230] Similar to effects on T cells, type I IFN signaling has both positive and negative effects on B cell responses depending on the timing and context of exposure (Braun et al., (2002) Int Immunol 14(4):411-419; Lin et al, (1998) 187(1):79-87). The survival and maturation of immature B cells can be inhibited by type I IFN signaling. In contrast to immature B cells, type I IFN exposure has been shown to promote B cell activation, antibody production and isotype switch following viral infection or following experimental immunization (Le Bon et al., (2006) J Immunol 176:4:2074-2078; Swanson et al., (2010) J Exp Med 207:1485-1500).

[0231] A number of components involved in Type I IFN pathway signaling have been established, including STING, Interferon Regulatory Factors, such as IRF1, IRF3, IRF5, IRF7, IRF8, and IRF9, TBK1, IKKi, MyD88, MAVS and TRAM. Additional components involved in Type I IFN pathway signaling include IKKα, TRAF3, TRAF6, IRAK-1, IRAK-4, TRIF, IPS-1, TLR-3, TLR-4, TLR-7, TLR-8, TLR-9, RIG-1, DAI and IFI16.

[0232] Accordingly, in one embodiment, an immune potentiator mRNA encodes any of the foregoing components involved in Type I IFN pathway signaling.

[0233] Immune Potentiator mRNA Encoding STING

[0234] The present disclosure encompasses mRNA (including mmRNA) encoding STING, including constitutively active forms of STING, as immune potentiators. STING (STimulator of INterferon genes; also known as transmembrane protein 173 (TMEM173), mediator of IRF3 activation (MITA), methionine-proline-tyrosine-serine (MPYS), and ER IFN stimulator (ERIS)) is a 379 amino acid, endoplasmic reticulum (ER) resident transmembrane protein that functions as a signaling molecule controlling the transcription of immune response genes, including type I IFNs and pro-inflammatory cytokines (Ishikawa & Barber, (2008) Nature 455:647-678; Ishikawa et al., (2009) Nature 461:788-792; Barber (2010) Nat Rev Immunol 15(12):760-770).

[0235] STING functions as a signaling adaptor linking the cytosolic detection of DNA to the TBK1/IRF3/Type I IFN signaling axis. The signaling adaptor functions of STING are activated through the direct sensing of cyclic dinucleotides (CDNs). Examples of CDNs include cyclic di-GMP (guanosine 5′-monophosphate), cyclic di-AMP (adenosine 5′-monophosphate) and cyclic GMP-AMP (cGAMP). Initially characterized as ubiquitous bacterial secondary messengers, CDNs are now known to constitute a class of pathogen-associated molecular pattern molecules (PAMPs) that activate the TBK1/IRF3/type I IFN signaling axis via direct interaction with STING. STING is capable of sensing aberrant DNA species and/or CDNs in the cytosol of the cell, including CDNs derived from bacteria, and/or from the host protein cyclic GMP-AMP synthase (cGAS). The cGAS protein is a DNA sensor that produces cGAMP in response to detection of DNA in the cytosol (Burdette et al., (2011) Nature 478:515-518; Sun et al., (2013) Science 339:786-791; Diner et al., (2013) Cell Rep 3:1355-1361; Ablasser et al., (2013) Nature 498:380-384).

[0236] Upon binding to a CDN, STING dimerizes and undergoes a conformational change that promotes formation of a complex with TANK-binding kinase 1 (TBK1) (Ouyang et al., (2012) Immunity 36(6):1073-1086). This complex translocates to the perinuclear Golgi, resulting in delivery of TBK1 to endolysosomal compartments where it phosphorylates IRF3 and NF-κB transcription factors (Zhong et al., (2008) Immunity 29:538-550). A recent study has shown that STING functions as a scaffold by binding to both TBK1 and IRF3 to specifically promote the phosphorylation of IRF3 by TBK1 (Tanaka & Chen, (2012) Sci Signal 5(214):ra20). Activation of the IRF3-, IRF7- and NF-κB-dependent signaling pathways induces the production of cytokines and other immune response-related proteins, such as type I IFNs, which promote anti-pathogen and/or anti-tumor activity.

[0237] A number of studies have investigated the use of CDN agonists of STING as potential vaccine adjuvants or immunomodulatory agents to elicit humoral and cellular immune responses (Dubensky et al., (2013) Ther Adv Vaccines 1(4): 131-143 and references therein). Initial studies demonstrated that administration of the CDN c-di-GMP attenuated Staphylococcus aureus infection in vivo, reducing the number of recovered bacterial cells in a mouse infection model yet c-di-GMP had no observable inhibitory or bactericidal effect on bacterial cells in vitro suggesting the reduction in bacterial cells was due to an effect on the host immune system (Karaolis et al., (2005) Antimicrob Agents Chemother 49:1029-1038; Karaolis et al., (2007) Infect Immun 75:4942-4950). Recent studies have shown that synthetic CDN derivative molecules formulated with granulocyte-macrophage colony-stimulating factor (GM-CSF)-producing cancer vaccines (termed STINGVAX) elicit enhanced in vivo antitumor effects in therapeutic animal models of cancer as compared to immunization with GM-CSF vaccine alone (Fu et al., (2015) Sci Transl Med 7(283):283ra52), suggesting that CDN are potent vaccine adjuvants.

[0238] Mutant STING proteins resulting from polymorphisms mapped to the human TMEM73 gene have been described exhibiting a gain-of function or constitutively active phenotype. When expressed in vitro, mutant STING alleles were shown to potently stimulate induction of type I IFN (Liu et al., (2014) N Engl J Med 371:507-518; Jeremiah et al., (2014) J Clin Invest 124:5516-5520; Dobbs et al., (2015) Cell Host Microbe 18(2):157-168; Tang & Wang, (2015) PLoS ONE 10(3):e0120090; Melki et al., (2017) J Allergy Clin Immunol In Press; Konig et al., (2017) Ann Rheum Dis 76(2):468-472; Burdette et al. (2011) Nature 478:515-518).

[0239] Provided herein are mRNAs (including chemically modified mRNAs (mmRNAs)) encoding constitutively active forms of STING, including mutant human STING isoforms for use as immune potentiators as described herein. mRNAs encoding constitutively active forms of STING (e.g., mmRNAs), including mutant human STING isoforms are set forth in the Sequence Listing herein. The amino acid residue numbering for mutant human STING polypeptides used herein corresponds to that used for the 379 amino acid residue wild type human STING (isoform 1) available in the art as Genbank Accession Number NP_938023.

[0240] Accordingly, in one aspect, the disclosure provides a mRNA (e.g., mmRNA) encoding a mutant human STING protein having a mutation at amino acid residue 155, in particular an amino acid substitution, such as a V155M mutation. In one embodiment, the mRNA (e.g., mmRNA) encodes an amino acid sequence as set forth in SEQ ID NO: 1. In one embodiment, the STING V155M mutant is encoded by a nucleotide sequence shown in SEQ ID NO: 199, 1319 or 1320. In one embodiment, the mRNA (e.g., mmRNA) comprises a 3′ UTR sequence as shown in SEQ ID NO: 209, which includes an miR122 binding site.

[0241] In other aspects, the disclosure provides a mRNA encoding a mutant human STING protein having a mutation at amino acid residue 284, such as an amino acid substitution. Non-limiting examples of residue 284 substitutions include R284T, R284M and R284K. In certain embodiments, the mutant human STING protein has as a R284T mutation, for example has the amino acid sequence set forth in SEQ ID NO: 2 or is encoded by an the nucleotide sequence shown in SEQ ID NO 200 or SEQ ID NO: 1442. In certain embodiments, the mutant human STING protein has a R284M mutation, for example has the amino acid sequence as set forth in SEQ ID NO: 3 or is encoded by the nucleotide sequence shown in SEQ ID NO: 201 or SEQ ID NO: 1443. In certain embodiments, the mutant human STING protein has a R284K mutation, for example has the amino acid sequence as set forth in SEQ ID NO: 4 or 224, or is encoded by the nucleotide sequence shown in SEQ ID NO: 202, 225, 1444 or 1466.

[0242] In other aspects, the disclosure provides a mRNA encoding a mutant human STING protein having a mutation at amino acid residue 154, such as an amino acid substitution, such as a N154S mutation. In certain embodiments, the mutant human STING protein has a N154S mutation, for example has the amino acid sequence as set forth in SEQ ID NO: 5 or is encoded by the nucleotide sequence shown in SEQ ID NO: 203 or SEQ ID NO: 1445.

[0243] In yet other aspects, the disclosure provides a mRNA encoding a mutant human STING protein having a mutation at amino acid residue 147, such as an amino acid substitution, such as a V147L mutation. In certain embodiments, the mutant human STING protein having a V147L mutation has the amino acid sequence as set forth in SEQ ID NO: 6 or is encoded by the nucleotide sequence shown in SEQ ID NO: 204 or SEQ ID NO: 1446.

[0244] In other aspects, the disclosure provides a mRNA encoding a mutant human STING protein having a mutation at amino acid residue 315, such as an amino acid substitution, such as a E315Q mutation. In certain embodiments, the mutant human STING protein having a E315Q mutation has the amino acid sequence as set forth in SEQ ID NO: 7 or is encoded by the nucleotide sequence shown in SEQ ID NO: 205 or SEQ ID NO: 1447.

[0245] In other aspects, the disclosure provides a mRNA encoding a mutant human STING protein having a mutation at amino acid residue 375, such as an amino acid substitution, such as a R375A mutation. In certain embodiments, the mutant human STING protein having a R375A mutation has the amino acid sequence as set forth in SEQ ID NO: 8 or is encoded by the nucleotide sequence shown in SEQ ID NO: 206 or SEQ ID NO: 1448.

[0246] In other aspects, the disclosure provides a mRNA encoding a mutant human STING protein having a one or more or a combination of two, three, four or more of the foregoing mutations. Accordingly, in one aspect the disclosure provides a mRNA encoding a mutant human STING protein having one or more mutations selected from the group consisting of: V147L, N154S, V155M, R284T, R284M, R284K, E315Q and R375A, and combinations thereof. In other aspects, the disclosure provides a mRNA encoding a mutant human STING protein having a combination of mutations selected from the group consisting of: V155M and R284T; V155M and R284M; V155M and R284K; V155M and V147L; V155M and N154S; V155M and E315Q; and V155M and R375A.

[0247] In other aspects, the disclosure provides a mRNA encoding a mutant human STING protein having a V155M and one, two, three or more of the following mutations: R284T; R284M; R284K; V147L; N154S; E315Q; and R375A. In other aspects, the disclosure provides a mRNA encoding a mutant human STING protein having V155M, V147L and N154S mutations. In other aspects, the disclosure provides a mRNA encoding a mutant human STING protein having V155M, V147L, N154S mutations, and, optionally, a mutation at amino acid 284. In yet other aspects, the disclosure provides a mRNA encoding a mutant human STING protein having V155M, V147L, N154S mutations, and a mutation at amino acid 284 selected from R284T, R284M and R284K. In other aspects, the disclosure provides a mRNA encoding a mutant human STING protein having V155M, V147L, N154S, and R284T mutations. In other aspects, the disclosure provides a mRNA encoding a mutant human STING protein having V155M, V147L, N154S, and R284M mutations. In other aspects, the disclosure provides a mRNA encoding a mutant human STING protein having V155M, V147L, N154S, and R284K mutations.

[0248] In other embodiments, the disclosure provides a mRNA encoding a mutant human STING protein having a combination of mutations at amino acid residue 147, 154, 155 and, optionally, 284, in particular amino acid substitutions, such as a V147L, N154S, V155M and, optionally, R284M. In certain embodiments, the mutant human STING protein has V147N, N154S and V155M mutations, such as the amino acid sequence as set forth in SEQ ID NO: 9 or encoded by the nucleotide sequence shown in SEQ ID NO: 207 or SEQ ID NO: 1449. In certain embodiments, the mutant human STING protein has R284M, V147N, N154S and V155M mutations, such as the amino acid sequence as set forth in SEQ ID NO: 10 or encoded by the nucleotide sequence shown in SEQ ID NO: 208 or SEQ ID NO: 1450.

[0249] In another embodiment, the disclosure provides a mRNA encoding a mutant human STING protein that is a constitutively active truncated form of the full-length 379 amino acid wild type protein, such as a constitutively active human STING polypeptide consisting of amino acids 137-379.

[0250] Immune Potentiator mRNA Encoding Immune Regulatory Factor (IRF)

[0251] The present disclosure provides mRNA (including mmRNA) encoding Interferon Regulatory Factors, such as IRF1, IRF3, IRF5, IRF7, IRF8, and IRF9 as immune potentiators. The IRF transcription factor family is involved in the regulation of gene expression leading to the production of type I interferons (IFNs) during innate immune responses. Nine human IRFs have been identified to date (IRF-1-IRF-9), with each family member sharing extensive sequence homology within their N-terminal binding domains (DBDs) (Mamane et al., (1999) Gene 237:1-14; Taniguchi et al., (2001) Annu Rev Immunol 19:623-655). Within the IRF family, IRF1, IRF3, IRF5, and IRF7 have been specifically implicated as positive regulators of type I IFN gene transcription (Honda et al., (2006) Immunity 25(3):349-360). IRF1 was the first family member discovered to activate type I IFN gene promoters (Miyamoto et al., (1988) Cell 54:903-913). Although studies show that IRF1 participates in type I IFN gene expression, normal induction of type I IFN was observed in virus-infected IRF1−/− murine fibroblasts, suggesting dispensability (Matsuyama et al., (1993) Cell 75:83-97). IRF5 was also shown to be dispensable for type I IFN induction by viruses or TLR agonists (Takaoka et al., (2005) Nature 434:243-249).

[0252] Accordingly, in some aspects, the disclosure provides mRNA encoding constitutively active forms of human IRF1, IRF3, IRF5, IRF7, IRF8, and IRF9 as immune potentiators. In some aspects, the disclosure provides mRNA encoding constitutively active forms of human IRF3 and/or IRF7.

[0253] During innate immune responses, IRF-3 plays a critical role in the early induction of type I IFNs. The IRF3 transcription factor is constitutively expressed and shuttles between the nucleus and cytoplasm of cells in latent form, with a predominantly cytosolic localization prior to phosphorylation (Hiscott (2007) J Biol Chem 282(21): 15325-15329; Kumar et al., (2000) Mol Cell Biol 20(11):4159-4168). Upon phosphorylation of serine residues at the C-terminus by TBK-1 (TANK binding kinase 1; also known as T2K and NAK) and/or IKKε (inducible IκB kinase; also known as IKKi), IRF3 translocates from the cytoplasm into the nucleus (Fitzgerald et al., (2003) Nat Immuno 4(5):491-496; Sharma et al., (2003) Science 300:1148-1151; Hemmi et al., (2004) J Exp Med 199:1641-1650). The transcriptional activity of IRF3 is mediated by these phosphorylation and translocation events. A model for IRF3 activation proposes that C-terminal phosphorylation induces a conformational change in IRF3 that promotes homo- and/or heterodimerization (e.g. with IRF7; see Honda et al., (2006) Immunity 25(3):346-360), nuclear localization, and association with the transcriptional co-activators CBP and/or p300 (Lin et al., (1999) Mol Cell Biol 19(4):2465-2474). While inactive IRF3 constitutively shuttles into and out of the nucleus, phosphorylated IRF3 proteins remain associated with CBP and/or p300, are retained in the nucleus, and induce transcription of IFN and other genes (Kumar et al., (2000) Mol Cell Biol 20(11):4159-4168).

[0254] In contrast to IRF3, IRF7 exhibits a low expression level in most cells, but is strongly induced by type I IFN-mediated signaling, supporting the notion that IRF3 is primarily responsible for the early induction of IFN genes and that IRF7 is involved in the late induction phase (Sato et al., (2000) Immunity 13(4):539-548). Ligand-binding to the type I IFN receptor results in the activation of a heterotrimeric transcriptional activator, termed IFN-stimulated gene factor 3 (ISGF3), which consists of IRF9, STAT1, and STAT2, and is responsible for the induction of the IRF7 gene (Marie et al., (1998) EMBO J 17(22):6660-6669). Like IRF3, IRF7 can partition between cytoplasm and nucleus after serine phosphorylation of its C-terminal region, allowing its dimerization and nuclear translocation. IRF7 forms a homodimer or a heterodimer with IRF3, and each of these different dimers differentially acts on the type I IFN gene family members. IRF3 is more potent in activating the IFN-β gene than the IFN-α genes, whereas IRF7 efficiently activates both IFN-α and IFN-β genes (Marie et al., (1998) EMBO J 17(22):6660-6669).

[0255] Provided herein are mRNAs encoding constitutively active forms of IRF3 and IRF7 including mutant human IRF3 and mutant human IRF7 isoforms for use as immune potentiators as described herein. mRNAs encoding constitutively active forms of IRF3 and IRF7, including mutant human IRF3 and IRF7 isoforms are set forth in the Sequence Listing herein. The amino acid residue numbering for mutant human IRF3 polypeptides used herein corresponds to that used for the 427 amino acid residue wild type human IRF3 (isoform 1) available in the art as Genbank Accession Number NP_001562. The amino acid residue numbering for mutant human IRF7 polypeptides used herein corresponds to that used for the 503 amino acid residue wild type human IRF7 (isoform a) available in the art as Genbank Accession Number NP_001563.

[0256] Accordingly, in some aspects, the disclosure provides a mRNA encoding a mutant human IRF3 protein that is constitutively active, e.g., having a mutation at amino acid residue 396, such as an amino acid substitution, such as a S396D mutation, for example as set forth in the amino acid sequence of SEQ ID NO: 12 or encoded by the nucleotide sequence shown in SEQ ID NO: 211 or SEQ ID NO: 1463. In other aspects, the mRNA construct encodes a constitutively active mouse IRF3 polypeptide comprising an S396D mutation, for example as set forth in the amino acid sequence of SEQ ID NO: 11 or encoded by the nucleotide sequence shown in 210 or SEQ ID NO: 1452.

[0257] In other aspects, the disclosure provides a mRNA encoding a mutant human IRF7 protein that is constitutively active. In one aspect, the disclosure provides a mRNA encoding a constitutively active IR7 protein comprising one or more point mutations (amino acid substitutions compared to wild-type). In other aspects, the disclosure provides a mRNA encoding a constitutively active IR7 protein comprising a truncated form of the protein (amino acid deletions compared to wild-type). In yet other aspects, the disclosure provides a mRNA encoding a constitutively active IR7 protein comprising a truncated form of the protein that also includes one or more point mutations (a combination of amino acid deletions and amino acid substitutions compared to wild-type).

[0258] The wild-type amino acid sequence of human IRF7 (isoform a) is set forth in SEQ ID NO: 13, encoded by the nucleotide sequence shown in SEQ ID NO: 212 or SEQ ID NO: 1454. A series of constitutively active forms of human IRF7 were prepared comprising point mutations, deletions, or both, as compared to the wild-type sequence. In one aspect, the disclosure provides an immune potentiator mRNA construct encoding a constitutively active IRF7 polypeptide comprising one or more of the following mutations: S475D, S476D, S477D, S479D, L480D, S483D and S487D, and combinations thereof. In other aspects, the disclosure provides a mmRNA encoding a constitutively active IRF7 polypeptide comprising mutations S477D and S479D, as set forth in the amino acid sequence of SEQ ID NO: 14, encoded by the nucleotide sequence shown in SEQ ID NO: 213 or SEQ ID NO: 1455. In another aspect, the disclosure provides a mRNA encoding a constitutively active IRF7 polypeptide comprising mutations S475D, S477D and L480D, as set forth in the amino acid sequence of SEQ ID NO: 15, encoded by the nucleotide sequence shown in SEQ ID NO: 214 or SEQ ID NO: 1456. In other aspects, the disclosure provides a mRNA encoding a constitutively active IRF7 polypeptide comprising mutations S475D, S476D, S477D, S479D, S483D and S487D, as set forth in the amino acid sequence of SEQ ID NO: 16, encoded by the nucleotide sequence shown in SEQ ID NO: 215 or SEQ ID NO: 1457. In another aspect, the disclosure provides a mRNA encoding a constitutively active IRF7 polypeptide comprising a deletion of amino acid residues 247-467 (i.e., comprising amino acid residues 1-246 and 468-503), as set forth in the amino acid sequence of SEQ ID NO: 17, encoded by the nucleotide sequence shown in SEQ ID NO: 216 or SEQ ID NO: 1458. In yet other aspects, the disclosure provides a mRNA encoding a constitutively active IRF7 polypeptide comprising a deletion of amino acid residues 247-467 (i.e., comprising amino acid residues 1-246 and 468-503) and further comprising mutations S475D, S476D, S477D, S479D, S483D and S487D, as set forth in the amino acid sequence of SEQ ID NO: 18, encoded by the nucleotide sequence shown in SEQ ID NO: 217 or SEQ ID NO: 1459.

[0259] In other aspects, the disclosure provides a mRNA encoding a truncated IRF7 inactive “null” polypeptide construct comprising a deletion of residues 152-246 (i.e., comprising amino acid residues 1-151 and 247-503), as set forth in the amio acid sequence of SEQ ID NO: 19, encoded by the nucleotide sequence shown in SEQ ID NO: 218 or SEQ ID NO: 1460 (used, for example, for control purposes). In other aspects, the disclosure provides a mRNA encoding a truncated IRF7 inactive “null” polypeptide construct comprising a deletion of residues 1-151 (i.e., comprising amino acid residues 152-503), as set forth in the amino acid sequence of SEQ ID NO: 20, encoded by the nucleotide sequence shown in SEQ ID NO: 219 or SEQ ID NO: 1461 (used, for example, for control purposes).

[0260] Additional Immune Potentiator mRNAs that Activate Type I IFN

[0261] In addition to the STING and IRF mRNA constructs described above, the disclosure provides mRNA constructs encoding additional components of the Type I IFN signaling pathway that can be use as immune potentiators to enhance immune responses through activation of the Type I IFN signaling pathway. For example, in one embodiment, the immune potentiator mRNA construct encodes a MyD88 protein. MyD88 is known in the art to signal upstream of IRF7. In one aspect, the disclosure provides a mmRNA encoding a constitutively active MyD88 protein, such as mutant MyD88 protein having one or more point mutations. In one aspect, the disclosure provides a mRNA encoding a mutant human or mouse MyD88 protein having a L265P substitutions, as set forth in SEQ ID NOs: 134 (encoded by the nucleotide sequence shown in SEQ ID NO: 1409 or SEQ ID NO: 1480) and 135, respectively.

[0262] In another aspect, an immune potentiator mRNA construct encodes a MAVS (mitochondrial antiviral signaling) protein. MAVS is known in the art to signal upstream of IRF3/IRF7. MAVS has been demonstrated to be important in the protective interferon response to double-stranded RNA viruses. For example, rotavirus-infected mice lacking MAVS produce significantly less IFN-β and increased amounts of virus than mice with MAVS (Broquet, A. H. et al. (2011) J. Immunol. 186:1618-1626). Moreover, RIG-1 or MDA5 signaling through MAVS has been shown to be required for activation of IFN-β production by rotavirus-infected cells (Broquet et al., ibid). MAVS has also been shown to be critical for Type I interferon responses to Coxsackie B virus, mediated together with MDA5 (Wang, J. P. et al. (2010) J. Virol. 84:254-260). Still further, it has been shown that although distinct classes of receptors are responsible for RNA and DNA sensing in cells, the downstream signaling components are physically and functionally interconnected and there is cross-talk between RIG-1/MAVS RNA sensing and cGAS-STING DNA sensing pathways in potentiating efficient antiviral responses, including interferon responses (Zevini, A. et al. (2017) Trends Immunol. 38:194-205). In one aspect, the disclosure encompasses an mRNA encoding a constitutively active MAVS protein, such as mutant MAVS protein having one or more point mutations. In another aspect, the disclosure encompasses a wild-type MAVS protein that is overexpressed. In one aspect, the disclosure provides an mRNA encoding a MAVS protein as shown in SEQ ID NO: 1387. An exemplary nucleotide sequence encoding the MAVS protein of SEQ ID NO: 1387 is shown in SEQ ID NO: 1413 and SEQ ID NO: 1484.

[0263] In another aspect, an immune potentiator mRNA construct encodes a TRAM (TICAM2) protein. TRAM is known in the art to signal upstream of IRF3. In one aspect, the disclosure encompasses a mmRNA encoding a constitutively active TRAM protein, such as mutant TRAM protein having one or more point mutations. In another aspect, the disclosure encompasses a wild-type TRAM protein that is overexpressed. In one aspect, the disclosure provides an mRNA encoding a mouse TRAM protein as shown in SEQ ID NO: 136. An exemplary nucleotide sequence encoding the TRAM protein of SEQ ID NO: 136 is shown in SEQ ID NO: 1410 or SEQ ID NO: 1481.

[0264] In yet other aspects, the disclosure provides an immune potentiator mRNA construct encoding a TANK-binding kinase 1 (TBK1) or an inducible IκB kinase (IKKi, also known as IKKε), including constitutively active forms of TBK1 or IKKi, as immune potentiators. TBK1 and IKKi have been demonstrated to be components of the virus-activated kinase that phosphorylates IRF3 and IRF7, thus acting upstream from IRF3 and IRF7 in the Type I IFN signaling pathway (Sharma, S. et al. (2003) Science 300:1148-1151). TBK1 and IKKi are involved in the phosphorylation and activation of transcription factors (e.g. IRF3/7 & NF-κB) that induce expression of type I IFN genes as well as IFN-inducible genes (Fitzgerald, K. A. et al., (2003) Nat Immunol 4(5):491-496).

[0265] Accordingly, in one aspect, the disclosure provides an immune potentiator mRNA construct that encodes a TBK1 protein, including a constitutively active form of TBK1, including mutant human TBK1 isoforms. In yet other aspects, an immune potentiator mRNA construct encodes a IKKi protein, including a constitutively active form of IKKi, including mutant human IKKi isoforms.

Immune Potentiators mRNAs that Stimulate Inflammatory Responses

[0266] In other aspects, the disclosure provides immune potentiator mRNA constructs that enhance an immune response by stimulating an inflammatory response. Non-limiting examples of agents that stimulate an inflammatory response include STAT1, STAT2, STAT4 and STAT6. Accordingly, the disclosure provides an immune potentiator mRNA construct encoding one or a combination of these inflammation-inducing proteins, including a constitutively active form.

[0267] Provided herein are mRNAs encoding constitutively active forms of STAT6, including mutant human STAT6 isoforms for use as immune potentiators as described herein. mRNAs encoding constitutively active forms of STAT6, including mutant human STAT6 isoforms are set forth in the Sequence Listing herein. The amino acid residue numbering for mutant human STAT6 polypeptides used herein corresponds to that used for the 847 amino acid residue wild type human STAT6 (isoform 1) available in the art as Genbank Accession Number NP_001171550.1.

[0268] In one embodiment, the disclosure provides a mRNA construct encoding a constitutively active human STAT6 construct comprising one or more amino acid mutations selected from the group consisting of S407D, V547A, T548A, Y641F, and combinations thereof. In another embodiment, the mRNA construct encodes a constitutively active human STAT6 construct comprising V547A and T548A mutations, such as the sequence shown in SEQ ID NO: 137. In another embodiment, the mRNA construct encodes a constitutively active human STAT6 construct comprising a S407D mutation, such as the sequence shown in SEQ ID NO: 138. In another embodiment, the mRNA construct encodes a constitutively active human STAT6 construct comprising S407D, V547A and T548A mutations, such as the sequence shown in SEQ ID NO: 139. In another embodiment, the mRNA construct encodes a constitutively active human STAT6 construct comprising V547A, T548A and Y641F mutations, such as the sequence shown in SEQ ID NO: 140.

Immune Potentiator mRNAs that Stimulate NFkB Signaling

[0269] In other aspects, the disclosure provides immune potentiator mRNA constructs that enhance an immune response by stimulating NFkB signaling, which is known to be involved in stimulation of immune responses. Non-limiting examples of proteins that stimulate NFkB signaling include STING, c-FLIP, IKKβ, RIPK1, Btk, TAK1, TAK-TAB1, TBK1, MyD88, IRAK1, IRAK2, IRAK4, TAB2, TAB3, TRAF6, TRAM, MKK3, MKK4, MKK6 and MKK7. Accordingly, an immune potentiator mRNA construct of the present disclosure can encode any of these NFkB pathway-inducing proteins, for example in a constitutively active form.

[0270] Suitable STING constructs that can serve as immune potentiator mRNA constructs that enhance an immune response by stimulating NFkB signaling are described above in the subsection on immune potentiator mRNA constructs that activate Type I IFN.

[0271] Suitable MyD88 constructs that can serve as immune potentiator mRNA constructs that enhance an immune response by stimulating NFkB signaling are described above in the subsection on immune potentiator mRNA constructs that activate Type I IFN.

[0272] In one embodiment, the disclosure provides an immune potentiator mRNA construct that activates NFκB signaling encoding a c-FLIP (cellular caspase 8 (FLICE)-like inhibitory protein) protein (also known in the art as CASP8 and FADD-like apoptosis regulator), including a constitutively active c-FLIP. Provided herein are mmRNAs encoding constitutively active forms of c-FLIP, including mutant human c-FLIP isoforms for use as immune potentiators as described herein. mmRNAs encoding constitutively active forms of c-FLIP, including mutant human c-FLIP isoforms are set forth in the Sequence Listing herein. The amino acid residue numbering for mutant human c-FLIP polypeptides used herein corresponds to that used for the 480 amino acid residue wild type human c-FLIP (isoform 1) available in the art as Genbank Accession Number NP_003870.

[0273] In one embodiment, the mRNA encodes a c-FLIP long (L) isoform comprising two DED domains, a p20 domain and a p12 domain, such as having the sequence shown in SEQ ID NO: 141. In another embodiment, the mRNA encodes a c-FLIP short (S) isoform, encoding amino acids 1-227, comprising two DED domains, such as having the sequence shown in SEQ ID NO: 142. In another embodiment, the mRNA encodes a c-FLIP p22 cleavage product, encoding amino acids 1-198, such as having the sequence shown in SEQ ID NO: 143. In another embodiment, the mRNA encodes a c-FLIP p43 cleavage product, encoding amino acids 1-376, such as having the sequence shown in SEQ ID NO: 144. In another embodiment, the mRNA encodes a c-FLIP p12 cleavage product, encoding amino acids 377-480, such as having the sequence shown in SEQ ID NO: 145. Exemplary nucleotide sequences encoding the c-FLIP proteins discussed above are shown in SEQ ID NOs: 1398-1402 and 1469-1473.

[0274] In another embodiment, an immune potentiator mRNA construct that activates NFκB signaling encodes a constitutively active IKKα mRNA construct or a constitutively active IKKβ mRNA construct. In one embodiment, the constitutively active human IKKβ polypeptide comprises S177E and S181E mutations, such as the sequence shown in SEQ ID NO: 146. In another embodiment, the constitutively active human IKKβ polypeptide comprises S177A and S181A mutations, such as the sequence shown in SEQ ID NO: 147. In another embodiment, the mRNA construct encodes a constitutively active mouse IKKβ polypeptide. In one embodiment, the constitutively active mouse IKKβ polypeptide comprises S177E and S181E mutations, such as the sequence shown in SEQ ID NO: 148. In another embodiment, the constitutively active mouse IKKβ polypeptide comprises S177A and S181A mutations, such as the sequence shown in SEQ ID NO: 149. An exemplary nucleotide sequence encoding the protein of SEQ ID NO: 146 is shown in SEQ ID NO: 1414 and SEQ ID NO: 1485. In another embodiment, the mRNA construct encodes a constitutively active human or mouse IKKα polypeptide comprising a PEST mutation, such as having a sequence as shown in SEQ ID NOs: 150 (human) (encoded by the nucleotide sequence shown in SEQ ID NO: 151 or SEQ ID NO: 28) or 154 (mouse) (encoded by the nucleotide sequence shown in SEQ ID NO: 155 or SEQ ID NO: 1429). In another embodiment, the mRNA construct encodes a constitutively active human or mouse IKKβ polypeptide comprising a PEST mutation, such as having the sequence shown in SEQ ID NOs: 152 (human) (encoded by the nucleotide sequence shown in SEQ ID NO: 153 or SEQ ID NO: 1397) or 156 (mouse) (encoded by the nucleotide sequence shown in SEQ ID NO: 157 or SEQ ID NO: 1430).

[0275] In another embodiment, the disclosure provides an immune potentiator mRNA construct that activates NFκB signaling encoding a receptor-interacting protein kinase 1 (RIPK1) protein. Structure of DNA constructs encoding RIPK1 constructs that induce immunogenic cell death are described in the art, for example, Yatim, N. et al. (2015) Science 350:328-334 or Orozco, S. et al. (2014) Cell Death Differ. 21:1511-1521, and can be used in the design of suitable RNA constructs that are shown herein to also active NFkB signaling (see Examples). In one embodiment, the mRNA construct encodes RIPK1 amino acids 1-555 of a human or mouse RIPK1 polypeptide as well as an IZ domain, such as having the sequence shown in SEQ ID N: 158 (human) or 161 (mouse). In one embodiment, the mRNA construct encodes RIPK1 amino acids 1-555 of a human or mouse RIPK1 polypeptide as well as EE and DM domains, such as having the sequence shown in SEQ ID N: 159 (human) or 162 (mouse). In one embodiment, the mRNA construct encodes RIPK1 amino acids 1-555 of a human or mouse RIPK1 polypeptide as well as RR and DM domains, such as having the sequence shown in SEQ ID N: 160 (human) or 163 (mouse). Exemplary nucleotide sequences encoding the RIPK1 polypeptides described above are shown in SEQ ID NOs: 1403-1408 and 1474-1479.

[0276] In yet another embodiment, an immune potentiator mRNA construct that activates NFκB signaling encodes a Btk polypeptide, such as a mutant Btk polypeptide such as a Btk(E41K) polypeptide (e.g., encoding an ORF amino acid sequence shown in SEQ ID NO: 173).

[0277] In yet another embodiment, an immune potentiator mRNA construct that activates NFκB signaling encodes a TAK1 protein, such as a constitutively active TAK1.

[0278] In yet another embodiment, an immune potentiator mRNA construct that activates NFκB signaling encodes a TAK-TAB1 protein, such as a constitutively active TAK-TAB1. In one embodiment, an immune potentiator mRNA construct encodes a human TAK-TAB1 protein, such as having the sequence shown in SEQ ID NO: 164. An exemplary nucleotide sequence encoding the TAK-TAB1 protein of SEQ ID NO: 164 is shown in SEQ ID NO: 1411 or SEQ ID NO: 1482.

Immune Potentiator mRNAs Encoding Intracellular Adaptor Proteins

[0279] In one embodiment, the polypeptide encoded by the immune potentiator mRNA construct is an intracellular adaptor protein. Intracellular adaptors (also referred to as signal transducing adaptor proteins) are proteins that are accessories to main proteins in a signal transduction pathway. Adaptor proteins contain a variety of protein-binding modules that link protein-binding partners together and facilitate the creation of larger signaling complexes. These proteins tend to lack any intrinsic enzymatic activity themselves but instead mediate specific protein-protein interactions that drive the formation of protein complexes.

[0280] In one embodiment, the intracellular adaptor protein stimulates a Type I IFN response. In another embodiment, the intracellular adaptor protein stimulates an NFκB-mediated proinflammatory response.

[0281] In one embodiment, the intracellular adaptor protein is a STING protein, such as a constitutively active form of STING polypeptide, including mutant human STING isoforms. STING has been established in the art as an endoplasmic reticulum adaptor that facilitates innate immune signaling and has been shown to activate both NFkB-mediated and IRF3/IRF7-mediated transcription pathways to induce expression of Type I IFNs (see e.g., Ishikawa, H. and Barber, G. H. (2008) Nature 455:674-678). For example, STING acts as an adaptor protein in the activation of TBK1 (upstream of NFkB-mediated and IRF3/IRF-mediated transcription) following activation of cGAS and IFI16 by double-stranded DNA (e.g., viral DNA). Suitable mRNA constructs encoding STING are described in detail above in the section of immune potentiators that activate Type I interferon.

[0282] In another embodiment, the intracellular adaptor protein is a MAVS protein, such as a constitutively active form of MAVS polypeptide, including mutant human MAVS isoforms. MAVS is also known in the art as VISA (virus-induced signaling adaptor), IPS-1 or Cardif. MAVS has been established in the art to act as an intracellular adaptor protein in the activation of TBK1 (upstream of NFkB-mediated and IRF3/IRF-mediated transcription) following activation of the cytoplasmic RNA helicases RIG-1 and MDA5 by double stranded RNA (e.g., double-stranded RNA viruses). Suitable mRNA constructs encoding MAVS are described in detail above in the subsection of immune potentiators that activate Type I interferon.

[0283] In another embodiment, the intracellular adaptor protein is a MyD88 protein, such as a constitutively active form of MyD88 polypeptide, including mutant human MyD88 isoforms. MyD88 has been established in the art as an intracellular adaptor protein that is used by TLRs to activate Type I IFN responses and NFkB-mediated proinflammatory responses (see e.g., O'Neill, L. A. et al. (2003) J. Endotoxin Res. 9:55-59). Suitable mRNA constructs encoding MyD88 are described in detail above in the subsection on immune potentiators that activate Type I IFN responses.

Immune Potentiator mRNAs Encoding Intracellular Signalling Proteins

[0284] In another embodiment, the polypeptide encoded by the immune potentiator mRNA construct is an intracellular signaling protein. As used herein, an “intracellular signaling protein” refers to a protein involved in a signal transduction pathway and typically has enzymatic activity (e.g., kinase activity). In one embodiment, the polypeptide is an intracellular signaling protein of a TLR signaling pathway (i.e., the polypeptide is an intracellular molecule that functions in the transduction of TLR-mediated signaling but is not a TLR itself). In one embodiment, the intracellular signalling protein stimulates a Type I IFN response. In another embodiment, the intracellular signalling protein stimulates an NFκB-mediated proinflammatory response. Non-limiting examples of intracellular signalling proteins include MyD88, IRAK 1, IRAK2, IRAK4, TRAF3, TRAF6, TAK1, TAB2, TAB3, TAK-TAB1, MKK3, MKK4, MKK6, MKK7, IKKao, IKKβ, TRAM, TRIF, RIPK1, and TBK1. Specific examples of intracellular signaling proteins are described in the subsections on immune potentiators that activate Type I interferon or activate NFκB signaling.

Immune Potentiator mRNAs Encoding Transcription Factors

[0285] In another embodiment, the polypeptide encoded by the immune potentiator mRNA construct is a transcription factor. A transcription factor contains at least one sequence-specific DNA binding domain and functions to regulate the rate of transcription of a gene(s) to mRNA. In one embodiment, the transcription factor stimulates a Type I IFN response. In another embodiment, the transcription factor stimulates an NFκB-mediated proinflammatory response. Non-limiting examples of transcription factors include IRF3 or IRF7. Specific examples of IRF3 and IRF7 constructs are described in the subsection on immune potentiators that activate Type I interferon.

Immune Potentiator mRNAs Encoding Polypeptides Involved in Necroptosis or Necroptosome Formation

[0286] In another embodiment, the polypeptide encoded by the immune potentiator mRNA construct is involved in necroptosis or necroptosome formation. A polypeptide is “involved in” necroptosis or necroptosome formation if the protein mediates necroptosis itself or participates with additional molecules in mediating necroptosis and/or in necroptosome formation. Non-limiting examples of polypeptides involved in necroptosis or necroptosome formation include MLKL, RIPK1, RIPK3, DIABLO and FADD.

[0287] Suitable mRNA constructs encoding RIPK1 are described in detail above in the section of immune potentiators that activate NFκB signaling.

[0288] In one embodiment, the polypeptide encoded by the immune potentiator mRNA construct is mixed lineage kinase domain-like protein (MLKL). MLKL constructs induce necroptotic cell death, characterized by release of DAMPs. In one embodiment, the mRNA construct encodes amino acids 1-180 of human or mouse MLKL. Non-limiting examples of mRNA constructs encoding MLKL, or an immunogenic cell death-inducing fragment thereof, encode amino acids 1-180 of human or mouse MLKL comprising the amino sequences shown in SEQ ID NOs: 1327 and 1328, respectively. An exemplary nucleotide sequence encoding the MLKL protein of SEQ ID NO: 1327 is shown in SEQ ID NO: 1412 and SEQ ID NO: 1483.

[0289] In another embodiment, the polypeptide encoded by the immune potentiator mRNA construct is receptor-interacting protein kinase 3 (RIPK3). In one embodiment, the mRNA construct encodes a RIPK3 polypeptide that multimerize with itself (homo-oligomerization). In one embodiment, the mRNA construct encodes a RIPK3 polypeptide that dimerizes with RIPK1. In one embodiment, the mRNA construct encodes the kinase domain and the RHIM domain of RIPK3. In one embodiment, the mRNA construct encodes the kinase domain of RIPK3, the RHIM domain of RIPK3 and two FKBP(F>V) domains. In one embodiment, the mRNA construct encodes a RIPK3 polypeptide (e.g., comprising the kinase domain and the RHIM domain of RIPK3) and an IZ domain (e.g., an IZ trimer). In one embodiment, the mRNA construct encodes a RIPK3 polypeptide (e.g., comprising the kinase domain and the RHIM domain of RIPK3) and one or more EE or RR domains (e.g., 2×EE domains, or 2×RR domains). Additionally, the structure of DNA constructs encoding RIPK3 constructs that induce immunogenic cell death are described further in, for example, Yatim, N. et al. (2015) Science 350:328-334 or Orozco, S. et al. (2014) Cell Death Differ. 21:1511-1521, and can be used in the design of suitable RNA constructs. Non-limiting examples of mRNA constructs encoding RIPK3 comprise an ORF having any of the amino acid sequences shown in SEQ ID NOs: 1329-1344 and 1379. An exemplary nucleotide sequence encoding the RIPK3 polypeptide of SEQ ID NO: 1339 is shown in SEQ ID NO: 1415 and SEQ ID NO: 1486.

[0290] In another embodiment, an immune potentiator mRNA construct encodes direct IAP binding protein with low pI (DIABLO) (also known as SMAC/DIABLO). As described in the examples herein, DIABLO constructs induce release of cytokines. In one embodiment, the disclosure provides a mRNA construct encoding a wild-type human DIABLO Isoform 1 sequence, such as having the sequence shown in SEQ ID NO: 165 (corresponding to the 239 amino acid human DIABLO isoform 1 precursor disclosed in the art as Genbank Accession No. NP_063940.1). In another embodiment, the mRNA construct encodes a human DIABLO Isoform 1 sequence comprising an S126L mutation, such as having the sequence shown in SEQ ID NO: 166. In another embodiment, the mRNA construct encodes amino acids 56-239 of human DIABLO Isoform 1, such as having the sequence shown in SEQ ID N: 167. In another embodiment, the mRNA construct encodes amino acids 56-239 of human DIABLO Isoform 1 and comprises an S126L mutation, such as having the sequence shown in SEQ ID NO: 168. In another embodiment, the mRNA construct encodes a wild-type human DIABLO Isoform 3 sequence, such as having the sequence shown in SEQ ID NO: 169 (corresponding to the 195 amino acid human DIABLO isoform 3 disclosed in the art as Genbank Accession No. NP_001265271.1). In another embodiment, the mRNA construct encodes a human DIABLO Isoform 3 sequence comprising an S82L mutation, such as having the sequence shown in SEQ ID NO: 170. In another embodiment, the mRNA construct encodes amino acids 56-195 of human DIABLO Isoform 3, such as having the sequence shown in SEQ ID NO: 171. In another embodiment, the mRNA construct encodes amino acids 56-195 of human DIABLO Isoform 3 and comprises an S82L mutation, such as having the sequence shown in SEQ ID NO: 172. An exemplary nucleotide sequence encoding the DIABLO polypeptide of SEQ ID NO: 169 is shown in SEQ ID NO: 1416 and SEQ ID NO: 1487.

[0291] In another embodiment, the polypeptide encoded by the immune potentiator mRNA construct is FADD (Fas-associated protein with death domain). Non-limiting examples of mRNA constructs encoding FADD comprise an ORF having any of the amino acid sequences shown in SEQ ID NOs: 1345-1351. Examplary nucleotide sequences encoding the FADD proteins are shown in SEQ ID NOs: 1417-1422 and 1488-1493.

Immune Potentiator mRNAs Encoding Polypeptides Involved in Pyroptosis or Inflammasome Formation

[0292] In another embodiment, the polypeptide encoded by the immune potentiator mRNA construct is involved in pyroptosis or inflammasome formation. A polypeptide is “involved in” pyroptosis or inflammasome formation if the protein mediates pyroptosis itself or participates with additional molecules in mediating pyroptosis and/or in inflammasome formation. Non-limiting examples of polypeptides involved in pyroptosis or inflammasome formation include caspase 1, caspase 4, caspase 5, caspase 11, GSDMD, NLRP3, Pyrin domain and ASC/PYCARD.

[0293] In on embodiment, the polypeptide encoded by the immune potentiator mRNA construct is caspase 1. In one embodiment, the caspase 1 polypeptide is a self-activating caspase-1 polypeptide (e.g, encoding any of the ORF amino acid sequences shown in SEQ ID NOs: 175-178), which can promote cleavage of pro-IL1β and pro-IL18 to their respective mature forms.

[0294] In another embodiment, the polypeptide encoded by the immune potentiator mRNA construct is caspase-4 or caspase-5 or caspase-11. In various embodiments, the caspase-4, -5 or -11 construct can encode (i) full-length wild-type caspase-4, caspase-5 or caspase-11; (ii) full-length caspase-4, -5 or -11 plus an IZ domain; (iii) N-terminally deleted caspase-4, -5 or -11 plus an IZ domain; (iv) full-length caspase-4, -5 or -11 plus a DM domain; or (v) N-terminally deleted caspase-4, -5 or -11 plus a DM domain. Examples of N-terminally deleted forms of caspase-4 and caspase-11 contain amino acid residues 81-377. An example of an N-terminally deleted form of caspase-5 contains amino acid residues 137-434. Non-limiting examples of mRNA constructs encoding caspase-4 comprise an ORF having any of the amino acid sequences shown in SEQ ID NOs: 1352-1356. Non-limiting examples of mRNA constructs encoding caspase-5 comprise an ORF having any of the amino acid sequences shown in SEQ ID NOs: 1357-1361. Non-limiting examples of mRNA constructs encoding caspase-11 comprise an ORF having any of the amino acid sequences shown in SEQ ID NOs: 1362-1366.

[0295] In one embodiment, the polypeptide encoded by the immune potentiator mRNA construct is gasdermin D (GSDMD). In one embodiment, the mRNA construct encodes a wild-type human GSDMD sequence. In another embodiment, the mRNA construct encodes amino acids 1-275 of human GSDMD. In another embodiment, the mRNA construct encodes amino acids 276-484 of human GSDMD. In another embodiment, the mRNA construct encodes wild-type mouse GSDMD. In another embodiment, the mRNA construct encodes amino acids 1-276 of mouse GSDMD. In another embodiment, the mRNA construct encodes encodes amino acids 277-487 of mouse GSDMD. Non-limiting examples of mRNA constructs encoding GSDMD comprise an ORF having any of the amino acid sequences shown in SEQ ID NOs: 1367-1372.

[0296] In another embodiment, the polypeptide encoded by the immune potentiator mRNA construct is NLRP3. Non-limiting examples of mRNA constructs encoding NLRP3 encode the ORF amino acid sequences shown in SEQ ID NOs: 1373 or 1374.

[0297] In another embodiment, the polypeptide encoded by the immune potentiator mRNA construct is apoptosis-associated speck-like protein containing a CARD (ASC/PYCARD), or a fragment thereof, such as a domain. In one embodiment, the polypeptide is a Pyrin B30.2 domain. In another embodiment, the polypeptide is a Pyrin B30.2 domain comprising a V726A mutation. Non-limiting examples of mRNA constructs encoding a Pyrin B30.2 domain encode the ORF amino acid sequences shown in SEQ ID NOs: 1375 or 1376. Non-limiting examples of mRNA constructs encoding ASC encode the ORF amino acid sequences shown in SEQ ID NOs: 1377 or 1378.

Additional Immune Potentiator mRNAs

[0298] The present disclosure provides additional immune potentiator mRNA constructs. In some embodiments, the immune potentiator mRNA construct encodes a SOC3 polypeptide (e.g., encoding an ORF amino acid sequence shown in SEQ ID NO: 174).

[0299] In yet other embodiments, an immune potentiator mRNA construct encodes a protein that modulates dendritic cell (DC) activity, such as stimulating DC production, activity or mobilization. A non-limiting example of a protein that stimulates DC mobilization is FLT3. Accordingly, in one embodiment, the immune potentiator mRNA construct encodes a FLT3 protein.

[0300] An immune potentiator mRNA construct typically comprises, in addition to the polypeptide-encoding sequences, other structural properties as described herein for mRNA constructs (e.g., modified nucleobases, 5′ cap, 5′ UTR, 3′ UTR, miR binding site(s), polyA tail, as described herein). Suitable mRNA construct components are as described herein.

Antigens of Interest Including mRNAs

[0301] The immune potentiators mRNAs of the disclosure are useful in combination with any type of antigen for which enhancement of an immune response is desired, including with mRNA sequences encoding at least one antigen of interest (on either the same or a separate mRNA construct) to enhance immune responses against the antigen of interest, such as a tumor antigen or a pathogen antigen. Thus, the immune potentiator mRNAs of the disclosure enhance, for example, mRNA vaccine responses, thereby acting as genetic adjuvants. In one embodiment, the antigen(s) of interest is a tumor antigen. In another embodiment, the antigen(s) of interest is a pathogen antigen. In various embodiments, the pathogen antigen(s) can be from a pathogen selected from the group consisting of viruses, bacteria, protozoa, fungi and parasites.

[0302] In one embodiment, the antigen is an endogenous antigen, such as a tumor antigen or pathogen antigen released in situ. Alternatively, the antigen is an exogenous antigen. An exogenous antigen can be coadministered with the immune potentiator mRNA construct or, alternatively, can be administered before or after the immune potentiator mRNA construct. An exogenous antigen can be coformulated with an immune potentiator mRNA construct or, alternatively, can be separately formulated from the immune potentiator mRNA construct. In one embodiment, an exogenous antigen is encoded by an mRNA construct (e.g., mmRNA construct), either the same or a different mRNA construct as that encoding the immune potentiator. In other embodiments, the antigen can be, for example, a protein, a peptide, a glycoprotein, a polysaccharide or a lipid.

[0303] In one embodiment, the antigen(s) of interest is a tumor antigen. In one embodiment, the tumor antigen comprises a tumor neoepitope, e.g., mutant peptide from a tumor antigen. In one embodiment, the tumor antigen is a Ras antigen. A comprehensive survery of Ras mutations in cancer has been described in the art (Prior, I. A. et al. (2012) Cancer Res. 72:2457-2467). Accordingly, a Ras amino acid sequence comprising at least one mutation associated with cancer can be used as an antigen of interest. In one embodiment, the tumor antigen is a mutant KRAS antigen. Mutant KRAS antigens have been implicated in acquired resistance to certain therapeutic agents (see e.g., Misale, S. et al. (2012) Nature 486:532-536; Diaz, L. A. et al. (2012) Nature 486:537-540). Furthermore, anti-tumor vaccines comprising at least one mutant RAS peptide and an anti-metabolite chemotherapeutic agent have been described in the art (U.S. Pat. No. 9,757,439, the entire contents of which is expressly incorporated herein by reference). Accordingly, any of the mutant RAS peptides described in U.S. Pat. No. 9,757,439 can be used as an antigen of the disclosure, e.g., in combination with an immune potentiator of the disclosure to thereby enhance anti-tumore immune responses against a Ras tumor antigen.

[0304] In one embodiment, a mutant KRAS antigen comprises an amino acid sequence having one or more mutations selected from G12D, G12V, G13D and G12C, and combinations thereof. Non-limiting examples of mutant KRAS antigens include those comprising one or more of the amino acid sequences shown in SEQ ID NOs: 95-106 and 131-132. In one embodiment, the mutant KRAS antigen is one or more mutant KRAS 15mer peptides comprising a mutation selected from G12D, G12V, G13D and G12C, non-limiting examples of which are shown in SEQ ID NO: 95-97. In another embodiment, the mutant KRAS antigen is one or more mutant KRAS 25mer peptides comprising a mutation selected from G12D, G12V, G13D and G12C, non-limiting examples of which are shown in SEQ ID NO: 98-100 and 131. In another embodiment, the mutant KRAS antigen is one or more mutant KRAS 3×15mer peptides (3 copies of the 15mer peptide) comprising a mutation selected from G12D, G12V, G13D and G12C, non-limiting examples of which are shown in SEQ ID NO: 101-103. In another embodiment, the mutant KRAS antigen is one or more mutant KRAS 3×25mer peptides (three copies of the 25mer peptide) comprising a mutation selected from G12D, G12V, G13D and G12C, non-limiting examples of which are shown in SEQ ID NO: 104-106 and 132. In another embodiment, the mutant KRAS antigen is a 100mer concatemer peptide of the 25mer peptides containing the G12D, G12V, G13D and G12C mutations (i.e., a 100mer concatemer of SEQ ID NOs: 98, 99, 100 and 131). Accordingly, in one embodiment, the mutant KRAS antigen comprises an mRNA construct encoding SEQ ID NOs: 98, 99, 100 and 131. Further description of mutant KRAS antigens, amino acid sequences thereof, and mRNA sequences encoding therefor, are disclosed in U.S. Application Ser. No. 62/453,465, the entire contents of which is expressly incorporated herein by reference. In some embodiments, the mutant KRAS antigen is a 100mer concatemer peptide of the 25mer peptides containing the G12D, G12V, G13D and G12C mutations encoded by a nucleotide sequence shown in SEQ ID NO: 1321 or 1322.

[0305] In one embodiment, a tumor antigen is encoded by an mRNA construct that also comprises an immune potentiator (i.e., also encodes a polypeptide that enhances an immune response against the tumor antigen). Non-limiting examples of such constructs include the KRAS-STING constructs encoding one of the amino acid sequences shown in SEQ ID NOs: 107-130. Non-limiting examples of nucleotide sequences encoding the KRAS-STING constructs are shown in SEQ ID NOs: 220-223.

[0306] In yet another embodiment, the tumor antigen is an oncogenic virus antigen. In one embodiment, the oncogenic virus is human papillomavirus (HPV) and the HPV antigen(s) is an E6 and/or an E7 antigen. Non-limiting examples of HPV E6 antigens include those comprising an amino acid sequence shown in SEQ ID NOs: 36-72. Non-limiting examples of HPV E7 antigens include those comprising an amino acid sequence shown in SEQ ID NOs: 73-94. In other embodiments, the HPV antigen is an E1, E2, E4, E5, L1 or L2 protein, or antigenic peptide sequence thereof. Suitable HPV antigens are described further in PCT Application No. PCT/US2016/058314, the entire contents of which is expressly incorporated herein by reference.

[0307] In another embodiment, the tumor antigen is encoded by an mRNA cancer vaccine. Suitable mRNA cancer vaccines are described in detail in PCT Application No. PCT/US2016/044918, the entire contents of which is expressly incorporated herein by reference.

[0308] In yet another embodiment, the tumor antigen is an endogenous tumor antigen, such as a tumor antigen that is released upon destruction of tumor cells in situ. It has been established in the art that natural mechanisms exist that results in cell death in vivo leading to release of intracellular components such that an immune response may be stimulated against the intracellular components. Such mechanisms are referred to herein as immunogenic cell death and include necroptosis and pyroptosis. Accordingly, in one embodiment, an immune potentiator mRNA construct of the disclosure is administered to a tumor-bearing subject under conditions in which endogenous immunogenic cell death is occurring such that one or more endogenous tumor antigens are released, to thereby enhance an immune response against the tumor antigens. In one embodiment, the immune potentiator mRNA construct is administered to a tumor-bearing subject together with a second mRNA construct encoding an “executioner mRNA construct”, which stimulates immunogenic cell death of tumor cells in the subject. Examples of executioner mRNA constructs include those encoding MLKL, RIPK3, RIPK1, DIABLO, FADD, GSDMD, caspase-4, caspase-5, caspase-11, Pyrin, NLRP3 and ASC/PYCARD. Executioner mRNA constructs, and their use in combination with an immune potentiator mRNA construct, are described in further detail in U.S. Application Ser. No. 62/412,933, the entire contents of which is expressly incorporated herein by reference.

[0309] In one embodiment, the antigen(s) of interest is a pathogen antigen. In one embodiment, the pathogen antigen comprises a viral antigen. In one embodiment, the viral antigen is a human papillomavirus (HPV) antigen. In one embodiment, the HPV antigen is an E6 or an E7 antigen. Non-limiting examples of HPV E6 antigens include those comprising an amino acid sequence shown in SEQ ID NOs: 36-72. Non-limiting examples of HPV E7 antigens include those comprising an amino acid sequence shown in SEQ ID NOs: 73-94. In other embodiments, the HPV antigen is an E1, E2, E4, E5, L1 or L2 protein, or antigenic peptide sequence thereof. Suitable HPV antigens are described further in PCT Application No. PCT/US2016/058314, the entire contents of which is expressly incorporated herein by reference. In another embodiment, the viral antigen is a herpes simplex virus (HSV) antigen, such as an HSV-1 or HSV-2 antigen. For example, the viral antigen can be an HSV (HSV-1 or HSV-2) glycoprotein B, glycoprotein C, glycoprotein D, glycoprotein E, glycoprotein I, ICP4 or ICP0 antigen. Suitable HSV antigens are described further in PCT Application No. PCT/US2016/058314, the entire contents of which is expressly incorporated herein by reference.

[0310] In one embodiment, the pathogen antigen is a bacterial antigen. In one embodiment, the bacterial antigen is a multivalent antigen (i.e., the antigen comprises multiple antigenic epitopes, such as multiple antigenic peptides comprising different epitopes). In one embodiment, the bacterial antigen is a Chlamydia antigen, such as a MOMP, OmpA, OmpL, OmpF or OprF antigen. Suitable Chlamydia antigens are described further in PCT Application No. PCT/US2016/058314, the entire contents of which is expressly incorporated herein by reference.

[0311] In one embodiment, a pathogen antigen is encoded by an mRNA construct that also comprises an immune potentiator (i.e., also encodes a polypeptide that enhances an immune response against the tumor antigen).

[0312] An mRNA construct encoding an antigen(s) of interest typically comprises, in addition to the antigen-encoding sequences, other structural properties as described herein for mRNA constructs (e.g., modified nucleobases, 5′ cap, 5′ UTR, 3′ UTR, miR binding site(s), polyA tail, as described herein). Suitable mRNA construct components are as described herein.

### Oncoviruses

[0313] In one embodiment, an immune potentiator construct is used to enhance an immune response against one or more antigens from an oncogenic virus (oncovirus) Viral infections are the cause of a significant proportion of all human cancers. It has been estimated that approximately 12% of all human cancers worldwide have a viral etiology (Parkin (2006) Int J Cancer 118:3030-3044). The term “oncovirus” refers to any virus with a DNA and/or RNA genome capable of causing cancer and can be used synonymously with the terms “tumor virus” or “cancer virus”. The World Health Organization's International Agency for Research on Cancer (IARC) has recognized seven human oncoviruses as Group 1 Biological carcinogenic agents for which there is “sufficient evidence of carcinogenicity in humans”, including hepatitis B virus (HBV), hepatitis C virus (HCV), Epstein-Barr virus (EBV), high-risk human papillomaviruses (HIPVs), human T cell lymphotropic virus type 1 (HTLV-1), human immunodeficiency virus (HIV), and Kaposi's sarcoma herpes virus (KSHV) (Bouvard et al., (2009) Lancet Oncol 10:321-322). Merkel cell polyomavirus (MCV) is a recently discovered oncovirus that is classified by the IARC as a Group 2A Biological carcinogenic agent (Feng et al., (2008) Science 319(5866): 1096-1100).

[0314] The excellent record of safety, effectiveness, and ability to reach economically disadvantaged populations for vaccines targeting pathogenic viruses (e.g. polio, influenza) have prompted efforts to develop and implement prophylactic and therapeutic vaccination strategies targeting oncoviruses (Schiller and Lowy (2010) Ann Rev Microbiol 64:23-41). Accordingly, in one aspect, an immune potentiator construct can be used to enhance an immune response against one or more antigens of interest of an oncogenic virus. For example, an antigen(s) of interest from an oncogenic virus can be encoded by a chemically modified mRNA (mmRNA), provided on the same mmRNA as the immune potentiator construct or provided on a different construct mmRNA construct as the immune potentiator. The immune potentiator and antigen mmRNAs can be formulated (or coformulated) and administered (simultaneously or sequentially) to a subject in need thereof to stimulate an immune response against the oncogenic viral antigen(s) in the subject. Non-limiting examples of oncogenic viruses, and suitable antigens thereof for use in combination with an immune potentiator construct to thereby enhance an immune response against the oncogenic virus, are described further below.

[0315] A. Human Papillomaviruses (HPVs)

[0316] In one embodiment, the oncoviral antigen is from human papilloma virus (HPV). Cervical cancer is the fourth most prevalent malignancy affecting women worldwide (Wakeham and Kavanagh (2014) Curr Oncol Rep 16(9):402). Infection with human papillomavirus (HPV) is associated with nearly all cases of cervical cancer and is responsible for causing several other cancers including: penile, vaginal, vulval, anal and oropharyngeal (Forman et al., (2012) Vaccine 30 Suppl 5:F12-23; Maxwell et al., (2016) Annu Rev Med 67:91-101). To date, more than 300 papillomaviruses have been identified and sequenced, including over 200 types of HPV, which are categorized according to their oncogenic potential. The association between the development of cervical cancer and infection with “high-risk” HPV types is well-established and provides the rationale for HPV DNA testing during cervical screening and for the development of prophylactic vaccines (Egawa et al., (2015) Viruses 7(7):3863-3890). Among high-risk HPV types, HPV16 and HPV18 are the major papillomavirus types responsible for about 70% of cervical cancer cases (Walboomers et al., (1999) J Pathol 189(1):12-19; Clifford et al., (2002) Bri J Cancer 88:63-73).

[0317] The identification of HPV as the etiological agent of cervical cancer and other orogenital malignancies provided the opportunity to mitigate the morbidity and mortality caused by HPV-associated cancers through vaccination and other therapeutic strategies targeting the HPV infection (zur Hausen (2002) Nat Rev Cancer 2(5)-342-350). Prophylactic HPV vaccines exist targeting the major capsid protein L1 of the HPV viral particle (Harper et al., (2010) Discov Med 10(50):7-17; Kash et al., (2015) J Clin Med 4(4):614-633). These vaccines have prevented uninfected people from acquiring HPV infections as well as previously infected patients from being re-infected. However, currently available HPV vaccines are not able to treat or clear established HPV infections and HPV-associated lesions (Ma et al., (2012) Expert Opin Emerg Drugs 17(4):469-492). Therapeutic HPV vaccines represent a potential treatment approach to clear existing HPV infections and associated diseases. Unlike prophylactic HPV vaccines, which can generate neutralizing antibodies against viral particles, therapeutic HPV vaccines can stimulate cell-mediated immune responses to specifically target and kill infected cells.

[0318] Although many HPV infections remain asymptomatic and are cleared by the immune system, persistent HPV infections can develop, which may further develop into low or high-grade cervical intraepithelial neoplasia and/or cervical carcinoma (Ostor (1993) Int J Gynecol pathol 12(2):186-192; Ghittoni et al., (2015) Ecancermedicalscience 9:526). HPV viral DNA integrates into the host's genome in many HPV-associated lesions and cancers. This integration can lead to the deletion of early (E1, E2, E4, and E5) and late (L1 and L2) genes. The deletion of L1 and L2 during the integration process precludes the use of prophylactic vaccines against HPV-associated cancers. Furthermore, E2 is a negative regulator for the HPV oncogenes E6 and E7. The deletion of E2 during integration results in increased expression of E6 and E7 and is thought to contribute to HPV-associated carcinogensis. Oncoproteins E6 and E7 are required for the initiation and upkeep of HPV-associated malignancies and are expressed in transformed cells. Therapeutic HPV vaccines targeting E6 and E7 can circumvent the problem of immune tolerance against self-antigens because these virus encoded oncogenic proteins are foreign proteins to human bodies. For these reasons HPV oncoproteins E6 and E7 serve as an ideal target for therapeutic HPV vaccines.

[0319] Accordingly, in one aspect, an immune potentiator construct can be used to enhance an immune response against one or more HPV antigens of interest. For example, an antigen(s) of interest from HPV can be encoded by a chemically modified mRNA (mmRNA), provided on the same mmRNA as the immune potentiator construct or provided on a different construct mmRNA construct as the immune potentiator. The immune potentiator and HPV antigen mmRNAs can be formulated (or coformulated) and administered (simultaneously or sequentially) to a subject in need thereof to stimulate an immune response against the HPV antigen in the subject.

[0320] In some embodiments, a RNA (e.g., mRNA) vaccine (e.g., comprising an immune potentiator construct and an HPV antigen construct, on the same or different mRNAs) comprises at least one RNA (e.g., mRNA) polynucleotide having an open reading frame encoding at least one HPV antigenic polypeptide or an immunogenic fragment thereof (e.g., an immunogenic fragment capable of inducing an immune response to HPV). In some embodiments, at least one HPV antigenic polypeptide is selected from E1, E2, E4, E5, E6, E7, L1, and L2, and combinations thereof. In some embodiments, the at least one antigenic polypeptide is selected from E1, E2, E4, E5, E6, and E7. In some embodiments, the at least one antigenic polypeptide is E6, E7, or a combination of E6 and E7. In some embodiments, the at least one antigenic polypeptide is L1, L2, or a combination of L1 and L2.

[0321] In some embodiments, the at least one antigenic polypeptide is L1. In some embodiments, the L1 protein is obtained from HPV serotypes 6, 11, 16, 18, 31, 33, 35, 39, 30, 45, 51, 52, 56, 58, 59, 68, 73 or 82.

[0322] In some embodiments, the at least one antigenic polypeptide is L1, L2 or a combination of L1 and L2, and E6, E7, or a combination of E6 and E7.

[0323] In some embodiments, the at least one antigenic polypeptide is from HPV strain HPV type 16 (HPV16), HPV type 18 (HPV18), HPV type 26 (HPV26), HPV type 31 (HPV31), HPV type 33 (HPV33), HPV type 35 (HPV35), HPV type 45 (HPV45), HPV type 51, (HPV51), HPV type 52 (HPV52), HPV type 53 (HPV53), HPV type 56 (HPV56), HPV type 58 (HPV58), HPV type 59 (HPV59), HPV type 66 (HPV66), HPV type 68 (HPV68), HPV type 82 (HPV82), or a combination thereof. In some embodiments, the at least one antigenic polypeptide is from HPV strain HPV16, HPV18, or a combination thereof.

[0324] In some embodiments, the at least one antigenic polypeptide is from HPV strain HPV type 6 (HPV6), HPV type 11 (HPV11), HPV type 13 (HPV13), HPV type 40 (HPV40), HPV type 42 (HPV42), HPV type 43 (HPV43), HPV type 44 (HPV44), HPV type 54 (HPV54), HPV type 61 (HPV61), HPV type 70 (HPV70), HPV type 72 (HPV72), HPV type 81, (HPV81), HPV type 89 (HPV89), or a combination thereof.

[0325] In some embodiments, the at least one antigenic polypeptide is from HPV strain HPV type 30 (HPV30), HPV type 34 (HPV34), HPV type 55 (HPV55), HPV type 62 (HPV62), HPV type 64 (HPV64), HPV type 67 (HPV67), HPV type 69 (HPV69), HPV type 71 (HPV71), HPV type 73 (HPV73), HPV type 74 (HPV74), HPV type 83 (HPV83), HPV type 84 (HPV84), HPV type 85 (HPV85), or a combination thereof.

[0326] In some embodiments, a vaccine comprises at least one RNA (e.g., mRNA) polynucleotide having an open reading frame encoding at least one (e.g., one, two, three, four, five, six, seven, or eight) of E1, E2, E4, E5, E6, E7, L1, and L2 protein obtained from HPV, or a combination thereof. In some embodiments, a vaccine comprises at least one RNA (e.g., mRNA) polynucleotide having an open reading frame encoding at least one (e.g., one, two, three, four, five, or six) polypeptide selected from E1, E2, E4, E5, E6, and E7 protein obtained from HPV, or a combination thereof. In some embodiments a vaccine comprises at least one RNA (e.g., mRNA) polynucleotide having an open reading frame encoding at least one polypeptide selected from E6 and E7 protein obtained from HPV, or a combination thereof. In some embodiments, a vaccine comprises at least one RNA (e.g., mRNA) polynucleotide having an open reading frame encoding a polypeptide selected from L1 or L2 protein obtained from HPV, or a combination thereof.

[0327] In some embodiments, the at least one RNA polynucleotide encodes an antigenic polypeptide that structurally modifies an infected cell.

[0328] In some embodiments, the at least one RNA polynucleotide encodes an antigenic polypeptide that forms part or all of the HPV viral capsid.

[0329] In some embodiments, the at least one RNA polynucleotide encodes an antigenic polypeptide that is capable of self-assembling into virus-like particles.

[0330] In some embodiments, the at least one RNA polynucleotide encodes an antigenic polypeptide that is responsible for binding of the HPV to a cell being infected.

[0331] Some embodiments of the disclosure concern methods of treating and/or preventing HPV infection in humans, wherein one or more of the compositions described herein, which contain one or more immunomodulatory therapeutic nucleic acids encoding an immune potentiator construct and at least one HPV polypeptide or an immunogenic fragment thereof, that have been shown or are predicted by one skilled in the art to produce an immune response, is provided to a subject in need thereof (e.g. a person that is infected with or who is at risk of infection by HPV).

[0332] In some embodiments, the disclosure concerns methods of treating and/or preventing cancer resulting from and/or causally associated with HPV infection. In some embodiments, the disclosure provides a method to reduce the HPV infection or at least one symptom resulting from HPV infection. In some embodiments, the disclosure provides a method to reduce the risk of cervical, penile, vaginal, vulval, anal or oropharyngeal cancer in a subject. In each of these methods, one or more of the compositions described herein, which contain one or more immunomodulatory therapeutic nucleic acids encoding an immune potentiator construct and at least one HPV polypeptide or an immunogenic fragment thereof, that have been shown or are predicted by one skilled in the art to produce an immune response, is provided to a subject in need thereof (e.g. a person that is infected with or who is at risk of infection by HPV).

[0333] Optionally, a subject in need of a medicament that prevents and/or treats HPV infection is provided a medicament comprising an immune potentiator construct and one or more of the immunomodulatory therapeutic nucleic acids encoding at least one HPV polypeptide or an immunogenic fragment thereof, to produce an immune response directed toward HPV and/or to the subject's cells that are infected with HPV. In some embodiments, the immune response results in a reduction in HPV viral titer. In some embodiments, the immune response results in the production of neutralizing anti-HPV antibodies. In some embodiments, the immune response results in a cytotoxic T-cell response directed at HPV infected cells.

[0334] B. Hepatitis B Virus (HBV)

[0335] In another embodiment, the oncoviral antigen is from the hepatitis B virus (HBV). The Hepatitis B Virus (HBV) is a double-stranded DNA virus belonging to the Hepadnaviridae family. Upon infection of humans, HBV causes the disease hepatitis B. In addition to causing hepatitis, infection with HBV can lead to the development of cirrhosis and hepatocellular carcinoma. Accordingly, in another aspect, an immune potentiator construct can be used to enhance an immune response against one or more Hepatitis B Virus (HBV) antigens of interest. For example, an antigen(s) of interest from HBV can be encoded by a chemically modified mRNA (mmRNA), provided on the same mmRNA as the immune potentiator construct or provided on a different construct mmRNA construct as the immune potentiator. The immune potentiator and HBV antigen mmRNAs can be formulated (or coformulated) and administered (simultaneously or sequentially) to a subject in need thereof to stimulate an immune response against the HBV antigen in the subject.

[0336] The HBV genome encodes four overlapping open reading frames (i.e. genes) demarcated by the letters S, C, P, and X (Ganem et al., (2001) Fields Virology 4^{th} ed.; Hollinger et al., (2001) Fields Virology 4^{th} ed.). The S gene encodes the viral surface envelope proteins, the HBsAg, and can be structurally and functionally divided into the pre-S1, pre-S2, and S regions. There are three forms of HBsAG, small (S), middle (M), and large (L). The core or C gene has the precore and core regions. Multiple in-frame translation initiation codons are a feature of the S and C genes, which give rise to related but functionally distinct proteins. The C gene encodes either the viral nucleocapsid HBcAg or hepatitis B e antigen (HBeAg) depending on whether translation is initiated from the core or precore regions, respectively. The core protein self-assembles into a capsid-like structure. The precore ORF encodes a signal peptide that directs the translation product to the endoplasmic reticulum of the infected cell, where the protein is further processed to form the secreted HBeAg. The function of HBeAg is largely uncharacterized, although it has been implicated in immune tolerance, whose function is to promote persistent infection (Milich and Liang (2003) Hepatology 38:1075-1086. The polymerase (pol) is a large protein of approximately 800 amino acids and is encoded by the P ORF. Pol is functionally divided into three domains: the terminal protein domain, which is involved in encapsidation and initiation of minus-strand synthesis; the reverse transcriptase (RT) domain, which catalyzes genome synthesis; and the ribonuclease H domain, which degrades pregenomic RNA and facilitates replication. The HBV X ORF encodes a 16.5-kd protein (HBxAg) with multiple functions, including signal transduction, transcriptional activation, DNA repair, and inhibition of protein degradation (Cross et al., (1993) Proc Natl Acad Sci USA 90:8078-8082; Bouchard and Schneider (2004) J Virol 78:12725-12734). The mechanism of this activity and the biologic function of HBxAg in the viral life-cycle remain largely unknown. However, it is well-established that HBxAg is necessary for productive HBV infection in vivo and may contribute to the oncogenic potential of HBV (Liang (2009) Hepatology 49(Suppl 55):S13-S21).

[0337] Despite the availability of an effective prophylactic vaccine, over 240 million people remain chronically infected with HBV and more than 500,000 people die each year from the liver diseases that result from chronic infection (World Health Organization (2015) Hepatitis B Fact Sheet FS204). The currently available therapeutic options for HBV infection include nucleos(t)ide analogues and alpha interferon (IFN-α). However, these treatments have several limitations. Nucleos(t)ide analogues effectively suppress virus replication but do not eliminate the infection. Once treatment with nucleos(t)ide analogues is stopped, the virus rapidly rebounds in the infected person. Furthermore, long-term treatment with antivirals can result in the generation of drug-resistant mutant viruses. In contrast to nucleos(t)ide analogues, IFN-α, which has both antiviral and immunomodulatory activities, can produce more durable results in some patients. However, IFN-α treatment is often associated with a high incidence of side effects, which makes it a suboptimal treatment option. Therefore, the design of new effective treatments for HBV-associated infection and disease is essential (Reynolds et al., (2015) J Virol 89(20):10407-10415).

[0338] HBV infection and its treatment are typically monitored by the detection of viral antigens and/or antibodies against the antigens. Upon infection with HBV, the first detectable antigen is the hepatitis B surface antigen (HBsAg), followed by the hepatitis B “e” antigen (HBeAg). Clearance of the virus is indicated by the appearance of IgG antibodies in the serum against HBsAg and/or against the core antigen (HBcAg), also known as seroconversion. Numerous studies indicate that viral replication, the level of viremia and progression to the chronic state in HBV-infected individuals are influenced directly and indirectly by HBV-specific cellular immunity mediated by CD4⁺ helper (T_{R}) and CD8⁺ cytotoxic T lymphocytes (CTLs). Patients progressing to chronic disease tend to have absent, weaker, or narrowly focused HBV-specific T cell responses as compared to patients who clear acute infection (see, e.g., Chisari, 1997, J Clin Invest 99: 1472-1477; Maini et al, 1999, Gastroenterology 117: 1386-1396; Rehermann et al, 2005, Nat Rev Immunol 2005; 5:215-229; Thimme et al, 2001, J Virol 75: 3984-3987; Urbani et al, 2002, J Virol 76: 12423-12434; Wieland and Chisari, 2005, J Virol 79: 9369-9380; Webster et al, 2000, Hepatology 32: 1117-1124; Penna et al, 1996, J Clin Invest 98: 1185-1194; Sprengers et al, 2006, J Hepatol 2006; 45: 182-189.)

[0339] In some embodiments, a RNA (e.g., mRNA) vaccine (e.g., comprising an immune potentiator construct and an HBV antigen construct, on the same or different mRNAs) comprises at least one RNA (e.g., mRNA) polynucleotide having an open reading frame encoding at least one HBV antigenic polypeptide or an immunogenic fragment thereof (e.g., an immunogenic fragment capable of inducing an immune response to HBV). In some embodiments, at least one HBV antigenic polypeptide is selected from HBsAg (S, M or L), HBcAg, HBeAg, HBxAg, Pol, and combinations thereof.

[0340] Based on intergroup divergence across sequenced genomes, HBV has been classified phylogenetically into 9 genotypes, A-I, with a putative 10^{th} genotype, J, isolated from a single individual. The HBV genotypes are further classified into at least 35 subgenotypes. Genotype differences impact disease severity, disease course and likelihood of complications, response to treatment and possibly response to vaccination (Kramvis et al., (2005), Vaccine 23 (19): 2409-2423; Magnius and Norder, (1995), Intervirology 38 (1-2): 24-34).

[0341] HBV genotype A is further classified into subgenotypes A1, A2, A4, and the quasi-subgenotype A3, the latter group of sequences does not meet the criteria for a subgenotype classification. HBV genotype B is further classified into 6 subgenotypes B1, B2, B4-B6, and quasi-subgenotype B3. HBV genotype C, the oldest HBV genotype, is further classified into 16 subgenotypes C1-C16, reflecting the long duration of endemicity in the human population. HBV genotype D is further classified into 6 subgenotypes D1-D6. HBV genotype F is further classified into 4 subgenotypes F1-F4. Genotype I is further classified into 2 subgenotypes II and 12. Furthermore, HBV has been classified by serology into 4 major serotypes adr, adw, ayr, and ayw based on antigenic epitopes present on HBV's envelope proteins (Kramvis (2014) Intervirology 57:141-150).

[0342] In some embodiments, the at least one HBV antigenic polypeptide is from HBV genotype A (e.g., any of subgenotypes A1-A4), HBV genotype B (e.g, any of subgenotypes B1-B6), HBV genotype C (e.g., any of subgenotypes C1-C16), HBV genotype D (e.g., any of subgenotypes D1-D6), HBV genotype E, HBV genotype F (e.g, any of subgenotypes F1-F4), HBV genotype G or HBV genotype I (e.g., any of subgenotypes I1-I2).

[0343] Some embodiments of the disclosure concern methods of treating and/or preventing HBV infection in humans, wherein one or more of the compositions described herein, which contain one or more immunomodulatory therapeutic nucleic acids encoding an immune potentiator construct and at least one HBV polypeptide or an immunogenic fragment thereof, that have been shown or are predicted by one skilled in the art to produce an immune response, is provided to a subject in need thereof (e.g. a person that is infected with or who is at risk of infection by HBV).

[0344] In some embodiments, the disclosure concerns methods of treating and/or preventing cancer resulting from and/or causally associated with HBV infection. In some embodiments, the disclosure provides a method to reduce the HBV infection or at least one symptom resulting from HBV infection. In some embodiments, the disclosure provides a method to reduce liver damage in a subject. In each of these methods, one or more of the compositions described herein, which contain one or more immunomodulatory therapeutic nucleic acids encoding an immune potentiator construct and at least one HBV polypeptide or an immunogenic fragment thereof, that have been shown or are predicted by one skilled in the art to produce an immune response, is provided to a subject in need thereof (e.g. a person that is infected with or who is at risk of infection by HBV).

[0345] Optionally, a subject in need of a medicament that prevents and/or treats HBV infection is provided a medicament comprising an immune potentiator construct and one or more of the immunomodulatory therapeutic nucleic acids encoding at least one HBV polypeptide or an immunogenic fragment thereof, to produce an immune response directed toward HBV and/or to the subject's cells that are infected with HBV. In some embodiments, the immune response results in a reduction in HBV viral titer. In some embodiments, the immune response results in the production of neutralizing anti-HBV antibodies. In some embodiments, the immune response results in a cytotoxic T-cell response directed at HBV infected cells.

[0346] In some embodiments, an immunomodulatory therapeutic nucleic acid (e.g., messenger RNA, mRNA) comprises at least one (e.g., mRNA) polynucleotide having an open reading frame encoding at least one HBV antigenic polypeptide or an immunogenic fragment thereof (e.g., an immunogenic fragment capable of inducing an immune response to HBV). In some embodiments, the at least one antigenic polypeptide or immunogenic fragment thereof is selected from HBsAg, HBcAg HBeAg HBxAg or Pol.

[0347] In some embodiments, the at least one antigenic polypeptide or immunogenic fragment thereof is selected from provisional and/or confirmed HBV genotypes and/or subgenotypes. In some embodiments, the at least one antigenic polypeptide or immunogenic fragment thereof is selected from provisional or unassigned HBV genotypes or subgenotypes.

[0348] In some embodiments, the at least one RNA polynucleotide encodes an antigenic polypeptide that structurally modifies an infected cell.

[0349] In some embodiments, the at least one RNA polynucleotide encodes an antigenic polypeptide that forms part or all of the HBV viral capsid.

[0350] In some embodiments, the at least one RNA polynucleotide encodes an antigenic polypeptide that is capable of self-assembling into virus-like particles.

[0351] In some embodiments, the at least one RNA polynucleotide encodes an antigenic polypeptide that is responsible for binding of the HBV virus to a cell being infected.

[0352] C. Hepatitis C Virus (HCV)

[0353] In another embodiment, the oncoviral antigen is from the hepatitis C virus (HCV). The hepatitis C virus (HCV) is a small, enveloped, positive-sense single-stranded RNA virus that causes hepatitis C, a viral infectious disease that primarily affects the liver. Accordingly, in another aspect, an immune potentiator construct can be used to enhance an immune response against one or more Hepatitis C Virus (HCV) antigens of interest. For example, an antigen(s) of interest from HCV can be encoded by a chemically modified mRNA (mmRNA), provided on the same mmRNA as the immune potentiator construct or provided on a different construct mmRNA construct as the immune potentiator. The immune potentiator and HCV antigen mmRNAs can be formulated (or coformulated) and administered (simultaneously or sequentially) to a subject in need thereof to stimulate an immune response against the HCV antigen in the subject.

[0354] The RNA genome of HCV encodes a large polyprotein of 3010 amino acids that is co- an post-translationally processed by cellular and virally encoded proteases and peptidases to produce the mature structural and non-structural (NS) proteins. The HCV structural proteins include Core (alternatively C or p22), and two envelope glycoproteins E1 and E2 (alternatively gp35 and gp70, respectively). The non-structural (NS) proteins include NS1 (alternatively p7), NS2 (alternatively p23), NS3 (alternatively p70), NS4A (alternatively p8), NS4B (alternatively p27), NS5A (alternatively p56/58), and NS5B (alternatively p68) (Ashfaq et al., (2011) Virol J 8:161).

[0355] On the basis of phylogenetic and sequence analyses of whole viral genomes, HCV variants are currently classified into 7 separate genotypes and more than 80 confirmed and provisional subtypes (Smith et al., (2014) Hepatology 59(1):318-327). The International Committee for Taxonomy of Viruses (ICTV) maintains and regularly updates tables of reference isolates, confirmed and provisional subtypes, unassigned HCV isolates, accession numbers, and annotated alignments (http://talk.ictvonline.org/links/hcv/hcv-classification.htm). HCV subtypes 1a, 1b, 2a, and 3a are considered “epidemic subtypes”, are globally distributed, and account for a large proportion of HCV infections in high-income countries. These subtypes are thought to have spread rapidly in the years prior to the discovery of HCV transmission by way of infected blood, blood products, intravenous drug use, and other routes (Smith et al., (2005) J Gen Virol 78(Pt2):321-328; Pybus et al., (2005) Infect Genet Evol 5:131-139; Magiorkinis et al., (2009) PLoS Med 6:e1000198). Other HCV subtypes are considered “endemic” strains, are comparatively rare, and have circulated for long periods of time in more restricted regions. Endemic strains from genotypes 1 and 2 are primarily localized to West Africa, 3 in south Asia, 4 in Central Africa and the Middle East, 5 in Southern Africa, and 6 in South East Asia (Simmonds (2001) J Gen Virol 82:693:712; Pybus et al., (2009) J Virol 83:1071-1082). To date, only one genotype 7 infection has been reported (Murphy et al., (2007) J Clin Microbiol 45:1102-1112).

[0356] HCV naturally infects only humans, although chimpanzees have been shown to be susceptible to experimental infection (Pfaender et al., (2014) Emerg Microbes Infect 3:e21). Chronic viral infection by HCV is a leading cause of cirrhosis, liver disease, portal hypertension, deteriorating liver function, and cancer (e.g. hepatocellular carcinoma, HCC) (Webster et al., (2015) Lancet 385(9973):1124-1135). Over 160-170 million people worldwide are estimated to have hepatitis C, which ultimately causes approximately 350,000 deaths per year (Zaltron et al., (2012) BMC Infect Dis 12(Suppl 2):52; Lavanchy (2011) Clin Microbiol Infect 17:107-115). Globally, approximately one quarter of all cirrhosis and HCC cases are attributed to HCV infection. However, in regions of high endemicity, HCV usually accounts for greater than 50% of HCC and cirrhosis cases (Perz et al., (2006) J Hepatol 45(4):529-538). Chronically infected people have a decreased quality of life compared to the general population (Bezemer et al., (2012) BMC Gastroenterol 12:11).

[0357] Blood and blood product transfusion was previously the major route of HCV transmission prior to the implementation of universal screening (Zou et al., (2010) Transfusion 50(7): 1495-1504). Percutaneous transmission via intravenous drug use is now the major route of transmission in developed countries (Cornberg et al., (2011) Liver Int 31(Suppl 2):30-60; Nelson et al., (2011) Lancet 378(9791:571-583). Social services such as needle and syringe exchange programmes (NSPs) and opiate substitution therapy (OST) can effectively reduce HCV transmission among people who inject drugs (PWID), but these approaches may be insufficient for reducing HCV prevalence to low levels (Turner et al., (2011) Addiction 106(11)1978-1988; Vikermann et al., (2012) Addiction 107(11):1984-1995). Very recently, highly effective direct-acting antiviral therapies (DAAs) have been developed and used to treat HCV infections (e.g. boceprevir, telaprevir, simeprevir, sofosbuvir, ledipasvir, ombitasvir, paritaprevir, ritonavir, dasabuvir, daclatasvir, elbasvir, grazoprevir, velpatasvir). Since DAAs can lead to a sustained virologic response (SVR, alternatively “viral cure”) in many patients, these drugs demonstrate potential for a treatment-as-prevention approach to decrease HCV prevalence (Smith-Palmer et al., (2015) BMC Infect Dis 15:19). However, the high financial cost and challenges of payer reimbursement decisions regarding these treatments currently restricts their widespread use (Martin et al., (2011) J Hepatol 54(6): 1137-1144; Martin et al., (2012) Hepatology 55(1):49-57; Brennan and Shrank (2014) JAMA 312(6):593-594).

[0358] HCV vaccination is an alternative treatment and/or prevention strategy to decrease HCV prevalence. Early HCV vaccine studies in experimentally-infected chimpanzees found that a subunit vaccine composed of viral envelope glycoproteins E1 (gp35) and E2 (gp72) elicited a high efficacy humoral response that effectively controlled and facilitated clearance of the homologous HCV genotype 1a virus (Choo et al., (1994) Proc Nat Acad Sci USA 91(4): 1294-1298). Phase I studies conducted in humans demonstrated that a vaccine comprising glycoproteins E1 and E2 elicited broadly reactive neutralizing antibodies (Law et al., (2013) PLoS ONE 8(3):e59776). An alternative vaccination approach designed to generate T-cell responses against HCV has also been tested in human phase 1 studies and was shown to be highly immunogenic (Barnes et al., (2012) Sci Trans Med 4(115): 115ra1). These studies have demonstrated that both humoral, antibody-mediated immune responses and/or adaptive, T-cell-mediated responses are promising approaches for the development of a prophylactic and/or therapeutic HCV vaccine.

[0359] In some embodiments, a RNA (e.g., mRNA) vaccine (e.g., comprising an immune potentiator construct and an HCV antigen construct, on the same or different mRNAs) comprises at least one RNA (e.g., mRNA) polynucleotide having an open reading frame encoding at least one HCV antigenic polypeptide or an immunogenic fragment thereof (e.g., an immunogenic fragment capable of inducing an immune response to HCV). In some embodiments, at least one HCV antigenic polypeptide is selected from Core (C, p22), E1 (gp35), E2 (gp70), NS1 (p7), NS2 (p23), NS3 (p70), NS4A (p8), NS4B (p27), NS5A (p56/58), NS5B (p68), and combinations thereof.

[0360] Some embodiments of the disclosure concern methods of treating and/or preventing HCV infection in humans, wherein one or more of the compositions described herein, which contain one or more immunomodulatory therapeutic nucleic acids encoding an immune potentiator construct and at least one HCV polypeptide or an immunogenic fragment thereof, that have been shown or are predicted by one skilled in the art to produce an immune response, is provided to a subject in need thereof (e.g. a person that is infected with or who is at risk of infection by HCV). Optionally, a subject in need of a medicament that prevents and/or treats HCV infection is provided a medicament comprising one or more of the immunomodulatory therapeutic nucleic acids encoding an immune potentiator construct and at least one HCV polypeptide or an immunogenic fragment thereof, to produce an immune response directed toward HCV and/or to the subject's cells that are infected with HCV. In some embodiments, the immune response results in a reduction in HCV viral titer and/or the establishment of a sustained virologic response. In some embodiments, the immune response results in the production of neutralizing anti-HCV antibodies. In some embodiments, the immune response results in a cytotoxic T-cell response directed at HCV infected cells.

[0361] In some embodiments, an immunomodulatory therapeutic nucleic acid (e.g., messenger RNA, mRNA) comprises at least one (e.g., mRNA) polynucleotide having an open reading frame encoding at least one HCV antigenic polypeptide or an immunogenic fragment thereof (e.g., an immunogenic fragment capable of inducing an immune response to HCV). In some embodiments, the at least one antigenic polypeptide or immunogenic fragment thereof is selected from Core (C, p22), E1 (gp35), E2 (gp70), NS1 (p7), NS2 (p23), NS3 (p70), NS4A (p8), NS4B (p27), NS5A (p56/58), NS5B (p68), and combinations thereof.

[0362] In some embodiments, the at least one antigenic polypeptide or immunogenic fragment thereof is selected from confirmed HCV genotypes and/or subtypes 1, 1a, 1b, 1c, 1d, 1e, 1g, 1h, 1i, 1j, 1k, 1l, 1m, 1n, 2, 2a, 2b, 2c, 2d, 2e, 2f, 2i, 2j, 2k, 2l, 2m, 2q, 2r, 2t, 2u, 3, 3a, 3b, 3d, 3e, 3g, 3h, 3i, 3k, 4, 4a, 4b, 4c, 4d, 4f, 4g, 4k, 4l, 4m, 4n, 4o, 4p, 4q, 4r, 4s, 4t, 4v, 4w, 5, 5a, 6, 6a, 6b, 6c, 6d, 6e, 6f, 6g, 6h, 6i, 6j, 6k, 6l, 6m, 6n, 6o, 6p, 6q, 6r, 6s, 6t, 6u, 6v, 6w, 6xa, 6xb, 6xc, 6xd, 6xe, 7, or 7a. In some embodiments, the at least one antigenic polypeptide or immunogenic fragment thereof is selected from provisional HCV genotypes and/or subtypes 1f, 2g, 2h, 2n, 2o, 2p, 2s, 3c, 3f, 4e, 4h, 4i, or 4j. In some embodiments, the at least one antigenic polypeptide or immunogenic fragment thereof is selected from provisional or unassigned HCV isolates.

[0363] In some embodiments, the at least one RNA polynucleotide encodes an antigenic polypeptide that structurally modifies an infected cell.

[0364] In some embodiments, the at least one RNA polynucleotide encodes an antigenic polypeptide that forms part or all of the HCV viral capsid.

[0365] In some embodiments, the at least one RNA polynucleotide encodes an antigenic polypeptide that is capable of self-assembling into virus-like particles.

[0366] In some embodiments, the at least one RNA polynucleotide encodes an antigenic polypeptide that is responsible for binding of the HCV to a cell being infected.

[0367] D. Epstein-Barr Virus (EBV)

[0368] In another embodiment, the oncoviral antigen is from the Epstein-Barr Virus (EBV). The Epstein-Barr virus (EBV), alternatively human herpesvirus 4 (HHV-4), is the etiological agent of infectious mononucleosis and is associated with a large number of benign and malignant diseases, including several human cancers (e.g. Hodgkin's lymphoma, non-Hodgkin's lymphoma, Burkitt's lymphoma, breast cancer, hepatocellular carcinomas, gastric/stomach carcinoma, post-transplant lymphoproliferative disease (PTLD), central nervous system lymphoma (CNS), nasopharyngeal carcinoma, multiple sclerosis, EBV-associated lymphomas, oral hairy leukoplakia, diffuse large B-cell lymphoma, AIDS-related lymphoma) (Jha et al., (2016) Front Microbiol 7(1602) and references therein). EBV is an extremely prevalent virus infecting >95% of the world's adult population (Cohen (2000) N Engl J Med 343:481-492). Accordingly, in another aspect, an immune potentiator construct can be used to enhance an immune response against one or more Epstein-Barr Virus (EBV) antigens of interest. For example, an antigen(s) of interest from EBV can be encoded by a chemically modified mRNA (mmRNA), provided on the same mmRNA as the immune potentiator construct or provided on a different construct mmRNA construct as the immune potentiator. The immune potentiator and EBV antigen mmRNAs can be formulated (or coformulated) and administered (simultaneously or sequentially) to a subject in need thereof to stimulate an immune response against the EBV antigen in the subject.

[0369] The EBV genome is a linear double-stranded DNA (dsDNA) molecule, approximately 172 kb in length. The EBV genome has the coding potential for approximately 80 viral proteins, many whose function remains uncharacterized. Characterized EBV genes, including their corresponding gene products and proposed function, if known, include BKRF1 (EBNA1) [plasmid maintenance, DNA replication, transcriptional regulation], BYRF1 (EBNA2) [trans-activation], BLRF3/BERF1 (EBNA3A, alternatively EBNA3) [transcriptional regulation], BERF2a/b (EBNA3B, alternatively EBNA4), BERF3/4 (EBNA3C, alternatively EBNA6) [transcriptional regulation], BWRF1 (EBNA-LP, alternatively EBNA5) [trans-activation], BNLF1 (LMP1) [B-cell survival, anti-apoptosis], BNRF1 (LMP2A/B, alternatively TP1/2) [maintenance of latency], BARF0 (A73, RPMS1), EBER1/2 (small RNAs) [regulation of innate immunity], BZLF1 (ZEBRA/Zta/EB1) [trans-activation, initiation of lytic cycle], BRLF1 [trans-activation, initiation of lytic cycle], BILF4 [trans-activation, initiation of lytic cycle], BMRF1 [trans-activation], BALF2 [DNA binding], BALF5 [DNA polymerase], BORF2 [ribonucleotide reductase subunit], BARF1 [ribonucleotide reductase subunit], BXLF1 [thymidine kinase], BGLF5 [alkaline exonuclease], BSLF1 [primase], BBLF4 [helicase], BKRF3 [uracil DNA glycosylase], BLLF1 (gp350/220) [major envelope glycoprotein], BXLF2 (gp85, alternatively gH) [virus-host envelope fusion], BKRF2 (gp25, alternatively gL) [virus-host envelope fusion], BZLF2 (gp42) [virus-host envelope fusion, binds MHC class II], BALF4 (gp110, alternatively gB), BDLF3 (gp100-150), BILF2 (gp55-78), BCRF1 [viral interleukin-10], and BHRF1 [viral bcl-2 analogue] (Liebowitz and Kieff (1993) Epstein-Barr virus. In: The Human Herpesvirus. Roizman B, Whitley R J, Lopez C, editors, New York, pp. 107-172; Li et al., (1995) J Virol 69:3987-3994; Nolan and Morgan (1995) J Gen Virol 76:1381-1392; Thompson and Kurzrock (2004) Clin Cancer Res 10:803-821; Young and Murray (2003) Oncogene 22:5108-5121).

[0370] In some embodiments, a RNA (e.g., mRNA) vaccine (e.g., comprising an immune potentiator construct and an EBV antigen construct, on the same or different mRNAs) comprises at least one RNA (e.g., mRNA) polynucleotide having an open reading frame encoding at least one EBV antigenic polypeptide or an immunogenic fragment thereof (e.g., an immunogenic fragment capable of inducing an immune response to EBV). Any of the afore-mentioned EBV proteins can be used as the antigenic EBV polypeptide. Immunogenic EBV proteins and their epitopes have been described in the art (e.g., Rajcani J. et al. (2014) Recent Pat. Antiinfect. Drug Discover. 9:62-76). In certain embodiments, the antigenic EBV polypeptide is selected from the group consisting of BLLF1 (gp350/220), BZLF1/Zta, EBNA2, EBNA3, EBNA6, LMP1, LMP2A, and combinations thereof.

[0371] Two major EBV types are known to infect humans: EBV-1 and EBV-2 (alternatively known as types A and B or as the B95-8 strain and AG876 strain, respectively). The two EBV types differ in the sequence of genes that encode the EBV nuclear antigens EBNA-2, EBNA-3A/3, EBNA-3B/4, and EBNA-3C/6 (Sample et al., (1990) J Virol 64:4084-4092; Dambaugh et al., (1984) Proc Natl Acad Sci USA 81:7632-7636). Within the two major EBV types, extensive strain diversity is observed in EBVs isolated from clinical samples, which may play a role in disease type and severity. The first complete EBV genome sequence, B95-8, was published in 1984 (Baer et al., (1984) Nature 310:207-211). The genome sequences of 22 additional EBVs have been reported (AG876, GD1, GD2, HKNPC1, Akata, Mutu, C666-1, M81, Raji, K4123-Mi, and K4413-Mi), as well as eight EBV sequences derived from nasopharyngeal carcinoma clinical samples and three EBV genomes derived from the 1000 Genomes project (Tsai et al., (2013) Cell Rep 5:458-470; Dolan et al., (2006) Virology 350-164-170; Palser et al., (2015) J Virol 89(10):5222-5237 and references therein). A recent report analyzed the genomic sequences of 71 new EBV genomes, including the first EBV genome sequenced directly from saliva. These new EBV genomic sequences were analyzed in combination with the 12 previously published strains. This analysis revealed that the established gene map of the EBV genome (NC_007605) is representative of EBV isolates from different geographic locations and from different types of infection. The well-established EBV type 1 and type 2 classification was reexamined in this study and was found to remain the major form of variation, mostly accounted for by variation in EBNA2 and EBNA3A, -B, and -C (Palser et al., (2015) J Virol 89(10):5222-5237).

[0372] In some embodiments, the at least one EBV antigenic polypeptide is from EBV-1 or EBV-2.

[0373] Some embodiments of the disclosure concern methods of treating and/or preventing EBV infection in humans, wherein one or more of the compositions described herein, which contain one or more immunomodulatory therapeutic nucleic acids encoding an immune potentiator construct and at least one EBV polypeptide or an immunogenic fragment thereof, that have been shown or are predicted by one skilled in the art to produce an immune response, is provided to a subject in need thereof (e.g. a person that is infected with or who is at risk of infection by EBV). Optionally, a subject in need of a medicament that prevents and/or treats EBV infection is provided a medicament comprising one or more of the immunomodulatory therapeutic nucleic acids encoding an immune potentiator construct and at least one EBV polypeptide or an immunogenic fragment thereof, to produce an immune response directed toward EBV and/or to the subject's cells that are infected with EBV. In some embodiments, the immune response results in a reduction in EBV viral titer and/or the establishment of a sustained virologic response. In some embodiments, the immune response results in the production of neutralizing anti-EBV antibodies. In some embodiments, the immune response results in a cytotoxic T-cell response directed at EBV infected cells.

[0374] In some embodiments, the at least one RNA polynucleotide encodes an antigenic polypeptide that structurally modifies an infected cell.

[0375] In some embodiments, the at least one RNA polynucleotide encodes an antigenic polypeptide that forms part or all of the EBV viral capsid.

[0376] In some embodiments, the at least one RNA polynucleotide encodes an antigenic polypeptide that is capable of self-assembling into virus-like particles.

[0377] In some embodiments, the at least one RNA polynucleotide encodes an antigenic polypeptide that is responsible for binding of the EBV to a cell being infected.

[0378] E. Human T-Cell Lymphotropic Virus Type 1 (HTLV-1)

[0379] In another embodiment, the oncoviral antigen is from Human T-cell lymphotropic virus type 1 (HTLV-1). The human T-cell lymphotropic virus type 1 (HTLV-1, alternatively human T-lymphotropic virus or human T-cell leukemia-lymphoma virus) is a retrovirus that is capable of establishing a persistent infection in humans. HTLV-1 infects an estimated 10-20 million people worldwide and while infection is asymptomatic in most people, 3%-5% of infected individuals develop a highly malignant and therapeutically intractable adult T-cell leukemia/lymphoma (ATL) (Gessain et al., (2012) Front Microbiol 3:388; Taylor et al., (2005) Oncogene 24:6047-6057). HTLV infection is also causatively associated with several inflammatory and immune-mediated disorders, most notably HTLV-associated myleopathy/tropical spastic paraparesis (HAM/TSP). Approximately 0.25%-3.8% of HTLV-1-infected people develop HAM/TSP (Yamano and Sato (2012) Front Microbiol 3:389). Human transmission of HTLV-1 requires transfer of virus-infected cells via breast-feeding, sexual intercourse, transfusion of cell-containing blood components, and sharing of needles and/or syringes (e.g. intravenous drug use). Accordingly, in another aspect, an immune potentiator construct can be used to enhance an immune response against one or more Human T-cell lymphotropic virus type 1 (HTLV-1) antigens of interest. For example, an antigen(s) of interest from HTLV-1 can be encoded by a chemically modified mRNA (mmRNA), provided on the same mmRNA as the immune potentiator construct or provided on a different construct mmRNA construct as the immune potentiator. The immune potentiator and HTLV-1 antigen mmRNAs can be formulated (or coformulated) and administered (simultaneously or sequentially) to a subject in need thereof to stimulate an immune response against the HTLV-1 antigen in the subject.

[0380] HTLV-1 is a complex retrovirus; in addition to the standard repertoire of structural proteins and enzymes shared by all retroviridae (gag, pol, pro and env), the 3′ region of the HTLV-1 genome (alternatively called the pX region) encodes accessory genes tax, rex, p12, p21, p13, p30 and HBZ. Tax and HBZ are indispensable in the oncogenic process of ATL (Giam and Semmes (2016) Viruses 8(6): 161). Similar to other retroviruses, after transmission, viral reverse transcriptase generates proviral DNA from genomic viral RNA. The provirus is integrated into the host genome by viral integrase. Afterwards, HTLV-1 infection is thought to spread only through dividing cells, with minimal particle production. The quantification of provirus reflects the number of HTLV-1-infected cells, which defines the proviral load (Concalves et al., (2010) Clin Microbiol Rev 23(3):577-589).

[0381] In some embodiments, a RNA (e.g., mRNA) vaccine (e.g., comprising an immune potentiator construct and an HTLV-1 antigen construct, on the same or different mRNAs) comprises at least one RNA (e.g., mRNA) polynucleotide having an open reading frame encoding at least one HTLV-1 antigenic polypeptide or an immunogenic fragment thereof (e.g., an immunogenic fragment capable of inducing an immune response to HTLV-1). In certain embodiments, the antigenic HTLV-1 polypeptide is selected from the group consisting of gag, pol, pro, env, tax, rex, p12, p21, p13, p30, HBZ, and combinations thereof.

[0382] Some embodiments of the disclosure concern methods of treating and/or preventing HTLV-1 infection in humans, wherein one or more of the compositions described herein, which contain one or more immunomodulatory therapeutic nucleic acids encoding an immune potentiator construct and at least one HTLV-1 polypeptide or an immunogenic fragment thereof, that have been shown or are predicted by one skilled in the art to produce an immune response, is provided to a subject in need thereof (e.g. a person that is infected with or who is at risk of infection by HTLV-1). Optionally, a subject in need of a medicament that prevents and/or treats HTLV-1 infection is provided a medicament comprising one or more of the immunomodulatory therapeutic nucleic acids encoding an immune potentiator construct and at least one HTLV-1 polypeptide or an immunogenic fragment thereof, to produce an immune response directed toward HTLV-1 and/or to the subject's cells that are infected with HTLV-1. In some embodiments, the immune response results in a reduction in HTLV-1 viral titer and/or the establishment of a sustained virologic response. In some embodiments, the immune response results in the production of neutralizing anti-HTLV-1 antibodies. In some embodiments, the immune response results in a cytotoxic T-cell response directed at HTLV-1 infected cells.

[0383] In some embodiments, the at least one RNA polynucleotide encodes an antigenic polypeptide that structurally modifies an infected cell.

[0384] In some embodiments, the at least one RNA polynucleotide encodes an antigenic polypeptide that forms part or all of the HTLV-1 viral capsid.

[0385] In some embodiments, the at least one RNA polynucleotide encodes an antigenic polypeptide that is capable of self-assembling into virus-like particles.

[0386] In some embodiments, the at least one RNA polynucleotide encodes an antigenic polypeptide that is responsible for binding of the HTLV-1 to a cell being infected.

[0387] F. Kaposi's Sarcoma Herpesvirus (KSHV)

[0388] In another embodiment, the oncoviral antigen is from Kaposi's Sarcoma Herpesvirus (KSHV). Kaposi's sarcoma-associated herpesvirus (KSHV; alternatively human herpesvirus-8, HHV-8) is a double-stranded DNA γ-herpesvirus belonging to the Rhadinovirus genus within the Herpesviridae family. KSHV is the etiologic agent of all forms of Kaposi's sarcoma, a cancer commonly occurring in AIDS patients, and is causally associated with primary effusion lymphoma (PEL; alternatively body cavity-based lymphoma, BCBL), some types of multicentric Castleman's disease (MCD; alternatively multicentric Castleman's disease (MCD)-linked plasmablastic lymphoma), and KSHV inflammatory cytokine syndrome (KICS) (Chang et al., (1994) Science 266:1865-1869; Dupin et al., (1999) Proc Natl Acad Sci USA 96:4546-4551; Boshoff & Weiss (2002) Nat Rev Cancer 2(5):373-382; Yarchoan et al., (2005) Nat Clin Pract Oncol 2(8):406-415; Cesarman et al., (1995) N Engl J Med 332(18): 1186-1191; Staudt et al., (2004) Cancer Res 64(14):4790-4799; Soulier et al., (1995) Blood 86:1276-1280; Uldrick et al., (2010) Clin Infect Dis 51:350-358)). Accordingly, in another aspect, an immune potentiator construct can be used to enhance an immune response against one or more Kaposi's Sarcoma Herpesvirus (KSHV) antigens of interest. For example, an antigen(s) of interest from KSHV can be encoded by a chemically modified mRNA (mmRNA), provided on the same mmRNA as the immune potentiator construct or provided on a different construct mmRNA construct as the immune potentiator. The immune potentiator and KSHV antigen mmRNAs can be formulated (or coformulated) and administered (simultaneously or sequentially) to a subject in need thereof to stimulate an immune response against the KSHV antigen in the subject.

[0389] The KSHV genome comprises an approximately 165 kb dsDNA molecule and exhibits a high degree of sequence identity across the viral strains and isolates. Two major gene regions, K1/VIP (a variable immunoreceptor tyrosine-based activation motif protein, encoded by the 5′ terminus of the KSHV genome) and K15/LAMP (a latency-associated membrane protein, encoded by the 3′ terminus of the KSHV genome), located at the terminal ends of the viral genome, are highly variable compared to the central genomic region (Zong et al., (1999) J Virol 73:4156-4170; Poole et al., (1999) 73:6646-6660).

[0390] The sequence variability of the K1 gene has led to the determination of five major KSHV subtypes (A, B, C, D, and E), displaying up to 35% variability at the amino acid level across the viral strains. The sequence analysis of the K15 gene has led to the additional categorization of KSHV sequences, with variants designated as P, M, or N alleles, differing by up to 70% at the amino acid level (Hayward & Zong (2007) Curr Top Microbiol Immunol 312:1-42). Nine other viral genomic loci (approximately 5.6% of the genome) contain additional variability (T0.7/K12, K2, K3, ORF18/19, ORF26, K8, ORF73), as well as two loci within the ORF75 gene regions, within the central, more conserved region of the KSHV genome. Based on the K1/K15 variability, strain classification, and variability of nine ORFs, the known KSHV genomes are currently classified into 12 principal genotypes (Strahan et al., (2016) Viruses 8(4):92).

[0391] Essentially all cases of Kaposi's sarcoma carry KSHV and the continued presence of KSHV is required for tumorigenesis. The KSHV genome has the coding potential for approximately 90 proteins, many known to mediate viral replication, virus-host interactions, tumorigenesis, and immune suppression and evasion (Dittmer & Damania (2013) Curr Opin Virol 3:238-244), which can be considered potential therapeutic targets. Characterized KSHV genes, including their corresponding gene products and/or proposed function, if known, include ORFK1 (glycoprotein; KSHV ITAM signaling protein, KIS), ORF4 (Kaposi complement control protein, KCP; kaposica), ORF6 (ssDNA binding protein), ORF11 (dUTPase-related protein, DURP), ORFK2 (viral interleukin 6 homolog, vIL6), ORF70 (thymidylate synthase), ORFK4 (vCCL-2, vMIP-II, MIP-1b), ORFK4.1 (vCCL-3, vMIP-III, BCK), ORFK5 (modulator of immune response 2, MIR-2; E3 ubiquitin ligase), ORFK6 (vCCL-1, vMIP-I, MIP-1a), PAN (late gene expression), ORF16 (vBCL2, Bcl2 homolog), ORF17.5 (scaffold or assembly protein, SCAF), ORF18 (late gene regulation), ORF34 (binds to HIF-1α), ORF35 (required for efficient lytic virus reactivation), ORF36 (viral serine/threonine protein kinase), ORF37 (sox), ORF38 (tegument protein), ORF39 (glycoprotein M, gM), ORF45 (tegument protein; RSK activator), ORF46 (uracil deglycosylase), ORF47 (glycoprotein L, gL), ORF50 (RTA), ORFK8 (k-bZIP; replication associated protein, RAP), ORF57 (mRNA export/splicing), ORF58, ORF59 (processivity factor), ORF60 (ribonucleoprotein reductase), ORF61 (ribonucleoprotein reductase), ORFK12 (kaposin), ORF71 (vFLIP, ORFK13), ORF72 (vCyclin, vCYC), ORF73 (latency-associated nuclear antigen 1, LANA1), ORF8 (glycoprotein B, gB), ORF9 (DNA polymerase), ORF10 (regulator of interferon function), ORFK3 (modulator of immune response 1, MIR-1; E3 ubiquitin ligase), K5/6-AS, ORF17 (protease), ORF21 (thymidine kinase), ORF22 (glycoprotein H, gH), ORF23 (predicted glycoprotein), ORF24 (essential for replication), ORF25 (major capsid protein, MCP), ORF26 (minor capsid protein; triplex component 2, TRI-2), ORF27 (glycoprotein), ORF28 (BDLF3 EBV homolog), ORF29 (packaging protein), ORF30 (late gene regulation), ORF31 (nuclear and cytoplasmic), ORF32 (tegument protein), ORF33 (tegument protein), ORF40/41 (helicase-primase), ORF42 (tegument protein), ORF43 (portal capsid protein), ORF44 (helicase), ORF45.1, ORFK8.1A (glycoprotein, gp8.1A), ORFK8.1B (glycoprotein gp8.1B, ORF52 (tegument protein), ORF53 (glycoprotein N, gN), ORF54 (dUTPase/immunomodulatory), ORF55 (tegument protein), ORF56 (DNA replication), ORFK9 (vIRF1), ORFK10 (vIRF4), ORFK10.5 (vIRF3, LANA2), ORFK11 (vIRF2), ORF62 (triplex component 1, TRI-1), ORF65 (small capsid protein; small capsomer-interacting protein, SCIP), ORF66 (capsid), ORF67 (nuclear egress complex), ORF67.5, ORF68 (glycoprotein), ORF69 (BRLF2 nuclear egress), ORFK14 (vOX2), ORF74 (vGPCR), ORF75 (FGARAT), ORF2 (dihydrofolate reductase), ORF7 (virion protein, vGPCR), ORF48, ORF49 (activates JNK/p38), ORF63 (NLR homolog), ORF64 (deubiquitinase), ORFK15 (LMP1/2), and ORFK7 (viral inhibitor of apoptosis, vIAP).

[0392] In some embodiments, a RNA (e.g., mRNA) vaccine (e.g., comprising an immune potentiator construct and a KSHV antigen construct, on the same or different mRNAs) comprises at least one RNA (e.g., mRNA) polynucleotide having an open reading frame encoding at least one KSHV antigenic polypeptide or an immunogenic fragment thereof (e.g., an immunogenic fragment capable of inducing an immune response to KSHV). Any of the afore-mentioned KSHV proteins can be used as the antigenic KSHV polypeptide.

[0393] In some embodiments, the at least one KSHV antigenic polypeptide is from KSHV subtype A, KSHV subtype B, KSHV subtype C, KSHV subtype D or KSHV subtype E.

[0394] Some embodiments of the disclosure concern methods of treating and/or preventing KSHV infection in humans, wherein one or more of the compositions described herein, which contain one or more immunomodulatory therapeutic nucleic acids encoding an immune potentiator construct and at least one KSHV polypeptide or an immunogenic fragment thereof, that have been shown or are predicted by one skilled in the art to produce an immune response, is provided to a subject in need thereof (e.g. a person that is infected with or who is at risk of infection by KSHV). Optionally, a subject in need of a medicament that prevents and/or treats KSHV infection is provided a medicament comprising one or more of the immunomodulatory therapeutic nucleic acids encoding an immune potentiator construct and at least one KSHV polypeptide or an immunogenic fragment thereof, to produce an immune response directed toward KSHV and/or to the subject's cells that are infected with KSHV. In some embodiments, the immune response results in a reduction in KSHV viral titer and/or the establishment of a sustained virologic response. In some embodiments, the immune response results in the production of neutralizing anti-KSHV antibodies. In some embodiments, the immune response results in a cytotoxic T-cell response directed at KSHV infected cells.

[0395] In some embodiments, the at least one RNA polynucleotide encodes an antigenic polypeptide that structurally modifies an infected cell.

[0396] In some embodiments, the at least one RNA polynucleotide encodes an antigenic polypeptide that forms part or all of the KSHV viral capsid.

[0397] In some embodiments, the at least one RNA polynucleotide encodes an antigenic polypeptide that is capable of self-assembling into virus-like particles.

[0398] In some embodiments, the at least one RNA polynucleotide encodes an antigenic polypeptide that is responsible for binding of the KSHV to a cell being infected.

[0399] G. Merkel Cell Polyomavirus (MCPyV)

[0400] In another embodiment, the oncoviral antigen is from Merkel Cell Polyomavirus (MCPyV). Merkel cell polyomavirus (MCPyV) is a non-enveloped, double-stranded DNA virus of the Polyomaviridae family and is an etiological agent of Merkel cell carcinoma (MCC). MCC is a rare, but aggressive, form of skin cancer, associated with advanced age, excessive UV exposure, immune deficiencies, and the presence of MCPyV. Approximately 1,500 new cases of MCC are diagnosed per year in the US, representing a relatively rare cancer; however, the incidence of MCC has tripled in the last two decades and annual diagnoses continue to climb by 5-10%. Despite its rarity, MCC is one of the most lethal and aggressive skin cancers with a mortality rate greater than 30% (Agelli and Clegg (2003) J Am Acad Dermatol 49:832-841; Becker et al., (2009) Cell Mol Life Sci 66:1-8; Calder and Smoller (2010) Adv Anat Pathol 17:155-161; Hodgson, (2005) J Sur Oncol 89:1-4; Lemos and Nghiem, (2007) J Invest Dermatol 127:2100-2103). Accordingly, in another aspect, an immune potentiator construct can be used to enhance an immune response against one or more Merkel Cell Polyomavirus (MCPyV) antigens of interest. For example, an antigen(s) of interest from MCPyV can be encoded by a chemically modified mRNA (mmRNA), provided on the same mmRNA as the immune potentiator construct or provided on a different construct mmRNA construct as the immune potentiator. The immune potentiator and MCPyV antigen mmRNAs can be formulated (or coformulated) and administered (simultaneously or sequentially) to a subject in need thereof to stimulate an immune response against the MCPyV antigen in the subject.

[0401] MCC is derived from malignant transformation of Merkel cells (alternatively Merkel-Ranvier cells or tactile epithelial cells), which are mechanoreceptive cells involved in touch and/or tactile sensation (Woo et al., (2016) Trends Cell Biol 25(2):74-81). MCPyV and is present in 80%-85% of clinical MCC tumor specimens (Feng et al., (2008) Science 319:1096-1100; Dalianis and Hirsch (2013) Virology 437:63-72, and references therein). MCPyV is considered the only human polyomavirus to date to cause tumors in its natural host (Arora et al., (2012) Curr. Opin. Virol 2:489-498; Spurgeon and Lambert (2013) Virology 435:118-130).

[0402] MCPyV viral DNA is clonally integrated in 80%-85% of MCC tumors. The prototype virus (MCV350) genome is a circular, double-stranded DNA molecule comprising 5387 base-pairs. The genomes of all MCPyV strains sequenced average ˜5.4 kilobases. The MCPyV genome contains early and late coding regions, expressed bidirectionally, and separated by a non-coding regulatory region that contains the viral origin of replication. The MCPyV early region (alternatively “T antigen locus”) is approximately 3 kb in size and encodes genes that are the first to be expressed upon infection (Feng et al., (2011) PLoS ONE 6:e22468; Feng et al., (2008) Science 319:1096-1100; Neumann et al., (2011) PLoS ONE 6:e29112). The MCPyV early region expresses three T antigens (proteins): large T antigen (LT), small T antigen (sT), and 57 kT antigen (57 kT) (Shuda et al., (2009) Int J Cancer 125(6): 1243-9; Shuda et al., (2008) Proc Natl Acad Sci USA 105(42): 16272-7). In addition to the three T antigens, the MCPyV early gene locus also encodes a fourth protein, the alternative T antigen open reading frame (ALTO). ALTO is transcribed from the 200 amino acid MUR region of LT, and seems to be evolutionarily related to the middle T antigen of the murine polyomavirus (Carter et al., (2013) Proc Natl Acad Sci USA 110:12744-12749).

[0403] The late region of the MCPyV encodes open reading frames for the major capsid protein viral protein 1 (VP1) and the minor capsid proteins 2 and 3 (VP2 and VP3). The MCPyV genome expresses a 22-nucleotide viral miRNA (MCV-miR-M1-5p) from the late strand that most likely autoregulates early viral gene expression during the late phase of infection (Lee et al., (2011) J Clin Virol 52(3):272-5; Seo et al., (2009) Virology 383(2):183-7). Studies support that constitutive expression of viral T antigens is required for virus-induced transformation (Spurgeon and Lambert (2013) Virology 435(1):118-130 and references therein).

[0404] In some embodiments, a RNA (e.g., mRNA) vaccine (e.g., comprising an immune potentiator construct and a MCPyV antigen construct, on the same or different mRNAs) comprises at least one RNA (e.g., mRNA) polynucleotide having an open reading frame encoding at least one MCPyV antigenic polypeptide or an immunogenic fragment thereof (e.g., an immunogenic fragment capable of inducing an immune response to MCPyV). In some embodiments, the at least one MCPyV antigenic polypeptide or immunogenic fragment thereof is selected from large T antigen (LT), small T antigen (sT), 57 kT antigen (57 kT), alternative T antigen (ALTO), major capsid protein viral protein 1 (VP1), the minor capsid viral proteins 2 or 3 (VP2 or VP3), and combinations thereof.

[0405] Some embodiments of the disclosure concern methods of treating and/or preventing MCPyV infection in humans, wherein one or more of the compositions described herein, which contain one or more immunomodulatory therapeutic nucleic acids encoding an immune potentiator construct and at least one MCPyV polypeptide or an immunogenic fragment thereof, that have been shown or are predicted by one skilled in the art to produce an immune response, is provided to a subject in need thereof (e.g. a person that is infected with or who is at risk of infection by MCPyV).

[0406] In some embodiments, the disclosure concerns methods of treating and/or preventing cancer resulting from and/or causally associated with MCPyV infection, wherein one or more of the compositions described herein, which contain one or more immunomodulatory therapeutic nucleic acids encoding an immune potentiator construct and at least one MCPyV polypeptide or an immunogenic fragment thereof, that have been shown or are predicted by one skilled in the art to produce an immune response, is provided to a subject in need thereof (e.g. a person that is infected with or who is at risk of infection by MCPyV).

[0407] Optionally, a subject in need of a medicament that prevents and/or treats MCPyV infection is provided a medicament comprising one or more of the immunomodulatory therapeutic nucleic acids encoding an immune potentiator construct and at least one MCPyV polypeptide or an immunogenic fragment thereof, to produce an immune response directed toward MCPyV and/or to the subject's cells that are infected with MCPyV. In some embodiments, the immune response results in a reduction in MCPyV viral titer. In some embodiments, the immune response results in the production of neutralizing anti-MCPyV antibodies. In some embodiments, the immune response results in a cytotoxic T-cell response directed at MCPyV infected cells.

[0408] In some embodiments, an immunomodulatory therapeutic nucleic acid (e.g., messenger RNA, mRNA) comprises at least one (e.g., mRNA) polynucleotide having an open reading frame encoding at least one MCPyV antigenic polypeptide or an immunogenic fragment thereof (e.g., an immunogenic fragment capable of inducing an immune response to MCPyV). In some embodiments, the at least one antigenic polypeptide or immunogenic fragment thereof is selected from large T antigen (LT), small T antigen (sT), 57 kT antigen (57 kT), alternative T antigen (ALTO), major capsid protein viral protein 1 (VP1), the minor capsid viral proteins 2 or 3 (VP2 or VP3), and combinations thereof.

[0409] In some embodiments, the at least one antigenic polypeptide or immunogenic fragment thereof is selected from provisional and/or confirmed MCPyV genotypes and/or subtypes (e.g. see Martel-Jantin et al., (2014) J Clin Microbiol 52(5):1687-1690; Hashida et al., 2014 J. Gen. Virol. 95:135-141; Matsushita et al., (2014) Virus Genes 48:233-242; Baez et al., (2016) Virus Res 221:1-7 herein incorporated in their entirety by reference). In some embodiments, the at least one antigenic polypeptide or immunogenic fragment thereof is selected from unassigned MCPyV isolates.

[0410] In some embodiments, the at least one RNA polynucleotide encodes an antigenic polypeptide that structurally modifies an infected cell.

[0411] In some embodiments, the at least one RNA polynucleotide encodes an antigenic polypeptide that forms part or all of the MCPyV viral capsid.

[0412] In some embodiments, the at least one RNA polynucleotide encodes an antigenic polypeptide that is capable of self-assembling into virus-like particles.

[0413] In some embodiments, the at least one RNA polynucleotide encodes an antigenic polypeptide that is responsible for binding of the MCPyV virus to a cell being infected.

### Personalized Cancer Vaccines

[0414] In some aspects, the present disclosure provides a personalized cancer vaccine comprising one or more mRNA constructs, wherein the one or more mRNA constructs encodes a polypeptide that enhances an immune response (i.e., immune potentiator) to a cancer antigen of interest. In some embodiments, the cancer antigen of interest is encoded by either the same or a separate mRNA construct. In some embodiments, the cancer antigen of interest is specific for a subject. For example, a cancer antigen of interest (e.g., selected and/or designed as described below) can be encoded by a chemically modified mRNA (mmRNA), provided on the same mmRNA as the immune potentiator construct or provided on a different mmRNA construct as the immune potentiator. The immune potentiator and cancer antigen mmRNAs can be formulated (or coformulated) and administered (simultaneously or sequentially) to a subject in need thereof to stimulate an immune response against the cancer antigen in the subject. Suitable cancer antigens, including personalized antigens specific for a cancer subject, for use with the immune potentiators are described herein.

[0415] For instance, the vaccine may include mRNA encoding for one or more cancer antigens specific for each subject, referred to as neoepitopes. Antigens that are expressed in or by tumor cells are referred to as “tumor associated antigens”. A particular tumor associated antigen may or may not also be expressed in non-cancerous cells. Many tumor mutations are well known in the art. Tumor associated antigens that are not expressed or rarely expressed in non-cancerous cells, or whose expression in non-cancerous cells is sufficiently reduced in comparison to that in cancerous cells and that induce an immune response induced upon vaccination, are referred to as neoepitopes. Neoepitopes are completely foreign to the body and thus would not produce an immune response against healthy tissue or be masked by the protective components of the immune system. In some embodiments personalized vaccines based on neoepitopes are desirable because such vaccine formulations will maximize specificity against a patient's specific tumor. Mutation-derived neoepitopes can arise from point mutations, non-synonymous mutations leading to different amino acids in the protein; read-through mutations in which a stop codon is modified or deleted, leading to translation of a longer protein with a novel tumor-specific sequence at the C-terminus; splice site mutations that lead to the inclusion of an intron in the mature mRNA and thus a unique tumor-specific protein sequence; chromosomal rearrangements that give rise to a chimeric protein with tumor-specific sequences at the junction of 2 proteins (i.e., gene fusion); frameshift mutations or deletions that lead to a new open reading frame with a novel tumor-specific protein sequence; and translocations.

[0416] Methods for generating personalized cancer vaccines generally involve identification of mutations, e.g., using deep nucleic acid or protein sequencing techniques, identification of neoepitopes, e.g., using application of validated peptide-MHC binding prediction algorithms or other analytical techniques to generate a set of candidate T cell epitopes that may bind to patient HLA alleles and are based on mutations present in tumors, optional demonstration of antigen-specific T cells against selected neoepitopes or demonstration that a candidate neoepitope is bound to HLA proteins on the tumor surface and development of the vaccine.

[0417] Examples of techniques for identifying mutations include but are not limited to dynamic allele-specific hybridization (DASH), microplate array diagonal gel electrophoresis (MADGE), pyrosequencing, oligonucleotide-specific ligation, the TaqMan system as well as various DNA “chip” technologies i.e. Affymetrix SNP chips, and methods based on the generation of small signal molecules by invasive cleavage followed by mass spectrometry or immobilized padlock probes and rolling-circle amplification.

[0418] The deep nucleic acid or protein sequencing techniques are known in the art. Any type of sequence analysis method can be used. For instance nucleic acid sequencing may be performed on whole tumor genomes, tumor exomes (protein-encoding DNA) or tumor transcriptomes. Real-time single molecule sequencing-by-synthesis technologies rely on the detection of fluorescent nucleotides as they are incorporated into a nascent strand of DNA that is complementary to the template being sequenced. Other rapid high throughput sequencing methods also exist. Protein sequencing may be performed on tumor proteomes. Additionally, protein mass spectrometry may be used to identify or validate the presence of mutated peptides bound to MHC proteins on tumor cells. Peptides can be acid-eluted from tumor cells or from HLA molecules that are immunoprecipitated from tumor, and then identified using mass spectrometry. The results of the sequencing may be compared with known control sets or with sequencing analysis performed on normal tissue of the patient.

[0419] In some embodiments, these neoepitopes bind to class I HLA proteins with a greater affinity than the wild-type peptide and/or are capable of activating anti-tumor CD8 T-cells. Identical mutations in any particular gene are rarely found across tumors.

[0420] Proteins of MHC class I are present on the surface of almost all cells of the body, including most tumor cells. The proteins of MHC class I are loaded with antigens that usually originate from endogenous proteins or from pathogens present inside cells, and are then presented to cytotoxic T-lymphocytes (CTLs). T-Cell receptors are capable of recognizing and binding peptides complexed with the molecules of MHC class I. Each cytotoxic T-lymphocyte expresses a unique T-cell receptor which is capable of binding specific MHC/peptide complexes.

[0421] Using computer algorithms, it is possible to predict potential neoepitopes such as T-cell epitopes, i.e. peptide sequences, which are bound by the MHC molecules of class I or class II in the form of a peptide-presenting complex and then, in this form, recognized by the T-cell receptors of T-lymphocytes. Examples of programs useful for identifying peptides which will bind to MHC include for instance: Lonza Epibase, SYFPEITHI (Rammensee et al., Immunogenetics, 50 (1999), 213-219) and HLA_BIND (Parker et al., J. Immunol., 152 (1994), 163-175).

[0422] Once putative neoepitopes are selected, they can be further tested using in vitro and/or in vivo assays. Conventional in vitro lab assays, such as Elispot assays may be used with an isolate from each patient, to refine the list of neoepitopes selected based on the algorithm's predictions.

[0423] In some embodiments the mRNA cancer vaccines and vaccination methods include epitopes or antigens based on specific mutations (neoepitopes) and those expressed by cancer-germline genes (antigens common to tumors found in multiple patients, referred to herein as “traditional cancer antigens” or “shared cancer antigens”). In some embodiments, a traditional antigen is one that is known to be found in cancers or tumors generally or in a specific type of cancer or tumor. In some embodiments, a traditional cancer antigen is a non-mutated tumor antigen. In some embodiments, a traditional cancer antigen is a mutated tumor antigen.

[0424] In some embodiments, the vaccines may further include mRNA encoding for one or more non-mutated tumor antigens. In some embodiments, the vaccines may further include mRNA encoding for one or more mutated tumor antigens.

[0425] Many tumor antigens are known in the art. In some embodiments, the cancer or tumor antigen is one of the following antigens: CD2, CD19, CD20, CD22, CD27, CD33, CD37, CD38, CD40, CD44, CD47, CD52, CD56, CD70, CD79, CD137, 4-IBB, 5T4, AGS-5, AGS-16, Angiopoietin 2, B7.1, B7.2, B7DC, B7H1, B7H2, B7H3, BT-062, BTLA, CAIX, Carcinoembryonic antigen, CTLA4, Cripto, ED-B, ErbB1, ErbB2, ErbB3, ErbB4, EGFL7, EpCAM, EphA2, EphA3, EphB2, FAP, Fibronectin, Folate Receptor, Ganglioside GM3, GD2, glucocorticoid-induced tumor necrosis factor receptor (GITR), gp100, gpA33, GPNMB, ICOS, IGF1R, Integrin av, Integrin ανβ, LAG-3, Lewis Y, Mesothelin, c-MET, MN Carbonic anhydrase IX, MUC1, MUC16, Nectin-4, NKGD2, NOTCH, OX40, OX40L, PD-1, PDL1, PSCA, PSMA, RANKL, ROR1, ROR2, SLC44A4, Syndecan-1, TACI, TAG-72, Tenascin, TIM3, TRAILR1, TRAILR2, VEGFR-1, VEGFR-2, VEGFR-3, and variants thereof.

[0426] An epitope, also known as an antigenic determinant, as used herein is a portion of an antigen that is recognized by the immune system in the appropriate context, specifically by antibodies, B cells, or T cells. Epitopes include B cell epitopes and T cell epitopes. B-cell epitopes are peptide sequences which are required for recognition by specific antibody producing B-cells. B cell epitopes refer to a specific region of the antigen that is recognized by an antibody. The portion of an antibody that binds to the epitope is called a paratope. An epitope may be a conformational epitope or a linear epitope, based on the structure and interaction with the paratope. A linear, or continuous, epitope is defined by the primary amino acid sequence of a particular region of a protein. The sequences that interact with the antibody are situated next to each other sequentially on the protein, and the epitope can usually be mimicked by a single peptide. Conformational epitopes are epitopes that are defined by the conformational structure of the native protein. These epitopes may be continuous or discontinuous, i.e. components of the epitope can be situated on disparate parts of the protein, which are brought close to each other in the folded native protein structure.

[0427] T-cell epitopes are peptide sequences which, in association with proteins on APC, are required for recognition by specific T-cells. T cell epitopes are processed intracellularly and presented on the surface of APCs, where they are bound to MHC molecules including MHC class II and MHC class I.

[0428] In other aspects, the cancer vaccine of the invention comprises an mRNA vaccine encoding multiple peptide epitope antigens, arranged with one or more interspersed universal type II T-cell epitopes. The universal type II T-cell epitopes, include, but are not limited to ILMQYIKANSKFIGI (Tetanus toxin; SEQ ID NO: 226), FNNFTVSFWLRVPKVSASHLE, (Tetanus toxin; SEQ ID NO: 227), QYIKANSKFIGITE (Tetanus toxin; SEQ ID NO: 228) QSIALSSLMVAQAIP (Diptheria toxin; SEQ ID NO: 229), and AKFVAAWTLKAAA (pan-DR epitope (PADRE); SEQ ID NO: 230). In some embodiments, the mRNA vaccine comprises the same universal type II T-cell epitope. In other embodiments, the mRNA vaccine comprises 2, 3, 4, 5, 6, 7, 8, 9, 10, 15, or 20 different universal type II T-cell epitopes. In some embodiments, the one or more universal type II T-cell epitope(s) are interspersed between every cancer antigen. In other embodiments, the one or more universal type II T-cell epitope(s) are interspersed between every 2, 3, 4, 5, 6, 7, 8, 9, 10, 11, 12, 13, 14, 15, 16, 17, 18, 19, 20, 22, 24, 26, 28, 30, 35, 40, 45, 50, 55, 60, 65, 70, 75, 80, 85, 90, or 100 cancer antigens.

[0429] Epitopes can be identified using a free or commercial database (Lonza Epibase, antitope for example). Such tools are useful for predicting the most immunogenic epitopes within a target antigen protein. The selected peptides may then be synthesized and screened in human HLA panels, and the most immunogenic sequences are used to construct the mRNAs encoding the antigen(s). One strategy for mapping epitopes of Cytotoxic T-Cells based on generating equimolar mixtures of the four C-terminal peptides for each nominal 11-mer across a protein. This strategy would produce a library antigen containing all the possible active CTL epitopes.

[0430] The peptide epitope may be any length that is reasonable for an epitope. In some embodiments the peptide epitope is 9-30 amino acids. In other embodiments the length is 9-22, 9-29, 9-28, 9-27, 9-26, 9-25, 9-24, 9-23, 9-21, 9-20, 9-19, 9-18, 10-22, 10-21, 10-20, 11-22, 22-21, 11-20, 12-22, 12-21, 12-20, 13-22, 13-21, 13-20, 14-19, 15-18, or 16-17 amino acids.

[0431] The personalized cancer vaccines include multiple epitopes. In some embodiments, the personalized cancer vaccines encode 48-54 personalized cancer antigens. In one embodiment, the personalized cancer vaccines encode 52 personalized cancer antigens. In some embodiments, each of the personalized cancer antigens is encoded by a separate open reading frame. In some embodiments the personalized cancer vaccines are composed of 45 or more, 46 or more, 47 or more, 48 or more, 49 or more, 50 or more, 51 or more, 52 or more, 53 or more, 54 or more, or 55 or more antigens. In other embodiments the personalized cancer vaccines are composed of 1000 or less, 900 or less, 500 or less, 100 or less, 75 or less, 50 or less, 40 or less, 30 or less, 20 or less or 100 or less epitopes. In yet other embodiments the personalized cancer vaccines have 3-100, 5-100, 10-100, 15-100, 20-100, 25-100, 30-100, 35-100, 40-100, 45-100, 50-100, 55-100, 60-100, 65-100, 70-100, 75-100, 80-100, 90-100, 5-50, 10-50, 15-50, 20-50, 25-50, 30-50, 35-50, 40-50, 45-50, 100-150, 100-200, 100-300, 100-400, 100-500, 50-500, 50-800, 50-1,000, or 100-1,000 cancer antigens.

[0432] In some embodiments, the optimal length of a peptide epitope may be obtained through the following procedure: synthesizing a V5 tag concatemer-test protease site, introducing it into DC cells (for example, using an RNA Squeeze procedure), lysing the cells, and then running an anti-V5 Western blot to assess the cleavage at protease sites.

[0433] The RNA Squeeze technique is an intracellular delivery method by which a variety of materials can be delivered to a broad range of live cells. Cells are subjected to microfluidic construction, which causes rapid mechanical deformation. The deformation results in temporary membrane disruption and the newly-formed transient pores. Material is then passively diffused into the cell cytosol via the transient pores. The technique can be used in a variety of cell types, including primary fibroblasts, embryonic stem cells, and a host of immune cells, and has been shown to have relatively high viability in most applications and does not damage sensitive materials, such as quantum dots or proteins, through its actions. Sharei et al., PNAS (2013); 110(6):2082-7.

[0434] The neoepitopes may be designed to optimally bind to MHC in order to promote a robust immune response. In some embodiments each peptide epitope comprises an antigenic region and a MHC stabilizing region. An MHC stabilizing region is a sequence which stabilizes the peptide in the MHC. The MHC stabilizing region may be 5-10, 5-15, 8-10, 1-5, 3-7, or 3-8 amino acids in length. In yet other embodiments the antigenic region is 5-100 amino acids in length. The peptides interact with the molecules of MHC class I by competitive affinity binding within the endoplasmic reticulum, before they are presented on the cell surface. The affinity of an individual peptide is directly linked to its amino acid sequence and the presence of specific binding motifs in defined positions within the amino acid sequence. The peptide being presented in the MHC is held by the floor of the peptide-binding groove, in the central region of the α1/α2 heterodimer (a molecule composed of two nonidentical subunits). The sequence of residues, of the peptide-binding groove's floor determines which particular peptide residues it binds.

[0435] Optimal binding regions may be identified by a computer assisted comparison of the affinity of a binding site (MHC pocket) for a particular amino acid at each amino acid in the binding site for each of the target epitopes to identify an ideal binder for all of the examined antigens. The MHC stabilization regions of the epitopes may be identified using amino acid prediction matrices of data points for a binding site. An amino acid prediction matrix is a table having a first and a second axis defining data points. Prediction matrices can be generated as shown in Singh, H. and Raghava, G. P. S. (2001), “ProPred: prediction of HLA-DR binding sites.” Bioinformatics, 17(12), 1236-37).

[0436] In some embodiments the MHC stabilizing region is designed based on the subject's particular MHC. In that way the MHC stabilizing region can be optimized for each patient.

[0437] In some instances each epitope of an antigen may include a MHC stabilizing region. All of the MHC stabilizing regions within the epitopes may be the same or they may be different. The MHC stabilizing regions may be at the N terminal portion of the peptide or the C terminal portion of the peptide. Alternatively the MHC stabilizing regions may be in the central region of the peptide. The neoepitopes in some embodiments are 13 residues or less in length and usually consist of between about 8 and about 11 residues, particularly 9 or 10 residues. In other embodiments the neoepitopes may be designed to be longer. For instance, the neoepitopes may have extensions of 2-5 amino acids toward the N- and C-terminus of each corresponding gene product. The use of a longer peptide may allow endogenous processing by patient cells and may lead to more effective antigen presentation and induction of T cell responses.

[0438] The neoepitopes selected for inclusion in the vaccine typically will be high affinity binding peptides. In some aspect the neoepitope binds an HLA protein with greater affinity than a wild-type peptide. The neoepitope has an IC50 of at least less than 5000 nM, at least less than 500 nM, at least less than 250 nM, at least less than 200 nM, at least less than 150 nM, at least less than 100 nM, at least less than 50 nM or less in some embodiments. Typically, peptides with predicted IC50<50 nM, are generally considered medium to high affinity binding peptides and will be selected for testing their affinity empirically using biochemical assays of HLA-binding. Finally, it will be determined whether the human immune system can mount effective immune responses against these mutated tumor antigens and thus effectively kill tumor but not normal cells.

[0439] Neoepitopes having the desired activity may be modified as necessary to provide certain desired attributes, e.g. improved pharmacological characteristics, while increasing or at least retaining substantially all of the biological activity of the unmodified peptide to bind the desired MHC molecule and activate the appropriate T cell or B cell. For instance, the neoepitopes may be subject to various changes, such as substitutions, either conservative or non-conservative, where such changes might provide for certain advantages in their use, such as improved MHC binding. By conservative substitutions is meant replacing an amino acid residue with another which is biologically and/or chemically similar, e.g., one hydrophobic residue for another, or one polar residue for another. The substitutions include combinations such as Gly, Ala; Val, Ile, Leu, Met; Asp, Glu; Asn, Gln; Ser, Thr; Lys, Arg; and Phe, Tyr. The effect of single amino acid substitutions may also be probed using D-amino acids. Such modifications may be made using well known peptide synthesis procedures, as described in e.g., Merrifield, Science 232:341-347 (1986), Barany & Merrifield, The Peptides, Gross & Meienhofer, eds. (N.Y., Academic Press), pp. 1-284 (1979); and Stewart & Young, Solid Phase Peptide Synthesis, (Rockford, Ill., Pierce), 2d Ed. (1984).

[0440] The neoepitopes can also be modified by extending or decreasing the compound's amino acid sequence, e.g., by the addition or deletion of amino acids. The peptides, polypeptides or analogs can also be modified by altering the order or composition of certain residues, it being readily appreciated that certain amino acid residues essential for biological activity, e.g., those at critical contact sites or conserved residues, may generally not be altered without an adverse effect on biological activity.

[0441] Typically, a series of peptides with single amino acid substitutions are employed to determine the effect of electrostatic charge, hydrophobicity, etc. on binding. For instance, a series of positively charged (e.g., Lys or Arg) or negatively charged (e.g., Glu) amino acid substitutions are made along the length of the peptide revealing different patterns of sensitivity towards various MHC molecules and T cell or B cell receptors. In addition, multiple substitutions using small, relatively neutral moieties such as Ala, Gly, Pro, or similar residues may be employed. The substitutions may be homo-oligomers or hetero-oligomers. The number and types of residues which are substituted or added depend on the spacing necessary between essential contact points and certain functional attributes which are sought (e.g., hydrophobicity versus hydrophilicity). Increased binding affinity for an MHC molecule or T cell receptor may also be achieved by such substitutions, compared to the affinity of the parent peptide. In any event, such substitutions should employ amino acid residues or other molecular fragments chosen to avoid, for example, steric and charge interference which might disrupt binding.

[0442] The neoepitopes may also comprise isosteres of two or more residues in the neoepitopes. An isostere as defined here is a sequence of two or more residues that can be substituted for a second sequence because the steric conformation of the first sequence fits a binding site specific for the second sequence. The term specifically includes peptide backbone modifications well known to those skilled in the art. Such modifications include modifications of the amide nitrogen, the .alpha.-carbon, amide carbonyl, complete replacement of the amide bond, extensions, deletions or backbone crosslinks. See, generally, Spatola, Chemistry and Biochemistry of Amino Acids, Peptides and Proteins, Vol. VII (Weinstein ed., 1983).

[0443] The consideration of the immunogenicity is an important component in the selection of optimal neoepitopes for inclusion in a vaccine. Immunogenicity may be assessed for instance, by analyzing the MHC binding capacity of a neoepitope, HLA promiscuity, mutation position, predicted T cell reactivity, actual T cell reactivity, structure leading to particular conformations and resultant solvent exposure, and representation of specific amino acids. Known algorithms such as the NetMHC prediction algorithm can be used to predict capacity of a peptide to bind to common HLA-A and -B alleles. Structural assessment of a MHC bound peptide may also be conducted by in silico 3-dimensional analysis and/or protein docking programs. Use of a predicted epitope structure when bound to a MHC molecule, such as acquired from a Rosetta algorithm, may be used to evaluate the degree of solvent exposure of an amino acid residues of an epitope when the epitope is bound to a MHC molecule. T cell reactivity may be assessed experimentally with epitopes and T cells in vitro. Alternatively T cell reactivity may be assessed using T cell response/sequence datasets.

[0444] An important component of a neoepitope included in a vaccine, is a lack of self-reactivity. The putative neoepitopes may be screened to confirm that the epitope is restricted to tumor tissue, for instance, arising as a result of genetic change within malignant cells. Ideally, the epitope should not be present in normal tissue of the patient and thus, self-similar epitopes are filtered out of the dataset.

[0445] In other aspects the disclosure provides a method for preparing a mRNA cancer vaccine, by isolating a sample from a subject, identifying a plurality of cancer antigens in the sample, determining T-cell epitopes from the plurality of cancer antigens, preparing a mRNA cancer vaccine having an open reading frame encoding an antigen and a polypeptide that enhances an immune response to the antigen, wherein the antigen comprises at least one of the T-cell epitopes. In some embodiments the method further involves determining binding strength of the T-cell epitopes to a MHC of a subject. In other embodiments the method further involves determining a T-cell receptor face (TCR face) for each epitope and selecting epitopes having a TCR face with low similarity to endogenous proteins. The T-cell epitopes may have been optimized for binding strength to a MHC of the subject is provided. In some embodiments a TCR face for each epitope has a low similarity to endogenous proteins.

[0446] For instance a technology referred to as JanusMatrix (Epivax), which examines cross-reactive T cell epitopes from both HLA binding and TCR-facing sides to allow comparison across large genome sequence databases can be used to identify epitopes having a desirable TCR face and binding strength to MHC. A suite of algorithms can be used alone or together with the JanusMatrix to optimize epitope selection. For example EpiMatrix takes overlapping 9-mer frames derived from the conserved target protein sequences and scores them for potential binding affinity against a panel of Class I or Class II HLA alleles; each frame-by-allele assessment that scores highly and is predicted to bind is a putative T cell epitope. ClustiMer takes EpiMatrix output and identifies clusters of 9-mers that contain large numbers of putative T cell epitopes. BlastiMer automates the process of submitting the previously identified sequences to BLAST to determine if any share similarities with the human genome; any such similar sequences would be likely to be tolerated or to elicit an unwanted autoimmune response. EpiAssembler takes the conserved, immunogenic sequences identified by Conservatrix and EpiMatrix and knits them together to form highly immunogenic consensus sequences. JanusMatrix can be used to screen out sequences which could potentially elicit an undesired autoimmune or regulatory T cell response due to homology with sequences encoded by the human genome. VaccineCAD can be used to link candidate epitopes into a string-of-beads design while minimizing nonspecific junctional epitopes that may be created in the linking process.

[0447] Methods for generating personalized cancer vaccines according to the disclosure involve identification of mutations using techniques such as deep nucleic acid or protein sequencing methods as described herein of tissue samples. In some embodiments an initial identification of mutations in a patient's transcriptome is performed. The data from the patient's transcriptome is compared with sequence information from the patients exome in order to identify patient specific and tumor specific mutations that are expressed. The comparison produces a dataset of putative neoepitopes, referred to as a mutanome. The mutanome may include approximately 100-10,000 candidate mutations per patients. The mutanome is subject to a data probing analysis using a set of inquiries or algorithms to identify an optimal mutation set for generation of a neoantigen vaccine. In some embodiments an mRNA neoantigen vaccine is designed and manufactured. The patient is then treated with the vaccine.

[0448] In some embodiments the entire method from the initiation of the mutation identification process to the start of patient treatment is achieved in less than 2 months. In other embodiments the whole process is achieved in 7 weeks or less, 6 weeks or less, 5 weeks or less, 4 weeks or less, 3 weeks or less, 2 weeks or less or less than 1 week. In some embodiments the whole method is performed in less than 30 days.

[0449] The mutation identification process may involve both transcriptome and exome analysis or only transcriptome or exome analysis. In some embodiments transcriptome analysis is performed first and exome analysis is performed second. The analysis is performed on a biological or tissue sample. In some embodiments a biological or tissue sample is a blood or serum sample. In other embodiments the sample is a tissue bank sample or EBV transformation of B-cells.

[0450] Once an mRNA vaccine is synthesized, it is administered to the patient. In some embodiments the vaccine is administered on a schedule for up to two months, up to three months, up to four month, up to five months, up to six months, up to seven months, up to eight months, up to nine months, up to ten months, up to eleven months, up to 1 year, up to 1 and ½ years, up to two years, up to three years, or up to four years. The schedule may be the same or varied. In some embodiments the schedule is weekly for the first 3 weeks and then monthly thereafter.

[0451] At any point in the treatment the patient may be examined to determine whether the mutations in the vaccine are still appropriate. Based on that analysis the vaccine may be adjusted or reconfigured to include one or more different mutations or to remove one or more mutations.

[0452] It has been recognized and appreciated that, by analyzing certain properties of cancer associated mutations, optimal neoepitopes may be assessed and/or selected for inclusion in an mRNA vaccine. A property of a neoepitope or set of neoepitopes may include, for instance, an assessment of gene or transcript-level expression in patient RNA-seq or other nucleic acid analysis, tissue-specific expression in available databases, known oncogenes/tumor suppressors, variant call confidence score, RNA-seq allele-specific expression, conservative vs. non-conservative AA substitution, position of point mutation (Centering Score for increased TCR engagement), position of point mutation (Anchoring Score for differential HLA binding), Selfness: <100% core epitope homology with patient WES data, HLA-A and -B IC50 for 8mers-11mers, HLA-DRB1 IC50 for 15mers-20mers, promiscuity Score (i.e. number of patient HLAs predicted to bind), HLA-C IC50 for 8mers-11mers, HLA-DRB3-5 IC50 for 15mers-20mers, HLA-DQB1/A1 IC50 for 15mers-20mers, HLA-DPB1/A1 IC50 for 15mers-20mers, Class I vs Class II proportion, Diversity of patient HLA-A, -B and DRB1 allotypes covered, proportion of point mutation vs complex epitopes (e.g. frameshifts), and/or pseudo-epitope HLA binding scores.

[0453] In some embodiments, the properties of cancer associated mutations used to identify optimal neoepitopes are properties related to the type of mutation, abundance of mutation in patient sample, immunogenicity, lack of self-reactivity, and nature of peptide composition.

[0454] The type of mutation should be determined and considered as a factor in determining whether a putative epitope should be included in a vaccine. The type of mutation may vary. In some instances it may be desirable to include multiple different types of mutations in a single vaccine. In other instances a single type of mutation may be more desirable. A value for particular mutation can be weighted and calculated.

[0455] The abundance of the mutation in a patient sample may also be scored and factored into the decision of whether a putative epitope should be included in a vaccine. Highly abundant mutations may promote a more robust immune response.

[0456] In some embodiments, the personalized mRNA cancer vaccines described herein may be used for treatment of cancer.

[0457] mRNA cancer vaccines may be administered prophylactically or therapeutically as part of an active immunization scheme to healthy individuals or early in cancer or late stage and/or metastatic cancer. In one embodiment, the effective amount of the mRNA cancer vaccine provided to a cell, a tissue or a subject may be enough for immune activation, and in particular antigen specific immune activation.

[0458] In some embodiments, the mRNA cancer vaccine may be administered with an anti-cancer therapeutic agent, including but not limited to, a traditional cancer vaccine. The mRNA cancer vaccine and anti-cancer therapeutic can be combined to enhance immune therapeutic responses even further. The mRNA cancer vaccine and other therapeutic agent may be administered simultaneously or sequentially. When the other therapeutic agents are administered simultaneously they can be administered in the same or separate formulations, but are administered at the same time. The other therapeutic agents are administered sequentially with one another and with the mRNA cancer vaccine, when the administration of the other therapeutic agents and the mRNA cancer vaccine is temporally separated. The separation in time between the administration of these compounds may be a matter of minutes or it may be longer, e.g. hours, days, weeks, months. Other therapeutic agents include but are not limited to anti-cancer therapeutic, adjuvants, cytokines, antibodies, antigens, etc.

[0459] In another embodiment, the peptide epitopes are in the form of a concatemeric cancer antigen comprised of 2-100 peptide epitopes. In some embodiments, the concatemeric cancer antigen comprises one or more of: a) the 2-100 peptide epitopes are interspersed by cleavage sensitive sites; b) the mRNA encoding each peptide epitope is linked directly to one another without a linker; c) the mRNA encoding each peptide epitope is linked to one or another with a single nucleotide linker; d) each peptide epitope comprises 25-35 amino acids and includes a centrally located SNP mutation; e) at least 30% of the peptide epitopes have a highest affinity for class I MHC molecules from a subject; f) at least 30% of the peptide epitopes have a highest affinity for class II MHC molecules from a subject; g) at least 50% of the peptide epitopes have a predicated binding affinity of IC >500 nM for HLA-A, HLA-B and/or DRB1; h) the mRNA encodes 45-55 peptide epitopes; i) the mRNA encodes 52 peptide epitopes; j) 50% of the peptide epitopes have a binding affinity for class I MHC and 50% of the peptide epitopes have a binding affinity for class II MHC; k) the mRNA encoding the peptide epitopes is arranged such that the peptide epitopes are ordered to minimize pseudo-epitopes, l) at least 30% of the peptide epitopes are class I MHC binding peptides of 15 amino acids in length; and/or m) at least 30% of the peptide epitopes are class II MHC binding peptides of 21 amino acids in length.

### Bacterial Vaccines

[0460] In some aspects, the present disclosure provides a bacterial vaccine comprising one or more mRNA constructs, wherein the one or more mRNA constructs encodes a polypeptide that enhances an immune response (i.e., immune potentiator) to a bacterial antigen of interest. In some embodiments, the bacterial antigen of interest is encoded by either the same or separate mRNA construct. In some embodiments, the bacterial vaccine comprises one or more mRNA constructs encoding a polypeptide that enhances an immune response, and one or more mRNA constructs encoding at least one bacterial antigen of interest. For example, a bacterial antigen of interest can be encoded by a chemically modified mRNA (mmRNA), provided on the same mmRNA as the immune potentiator construct or provided on a different mmRNA construct as the immune potentiator. The immune potentiator and bacterial antigen mmRNAs can be formulated (or coformulated) and administered (simultaneously or sequentially) to a subject in need thereof to stimulate an immune response against the bacterial antigen in the subject. Suitable bacterial antigens for use with the immune potentiators are described herein.

[0461] In some embodiments, the bacterial vaccine is prophylactic (i.e., prevents infection). In some embodiments, the bacterial vaccine is therapeutic (i.e., treats infection). In some embodiments, the bacterial vaccine induces a humoral immune response (i.e., production of antibodies specific for the bacterial antigen of interest). In some embodiments, the bacterial vaccine induces an adaptive immune response. An adaptive immune response occurs in response to confrontation with an antigen or immunogen, where the immune response is specific for antigenic determinants of the antigen/immunogen. Examples of adaptive immune responses are induction of antigen specific antibody production or antigen specific induction/activation of T helper lymphocytes or cytotoxic lymphocytes.

[0462] In some embodiments, the bacterial vaccine induces a protective, adaptive immune response, wherein an antigen-specific immune response is induced in a subject as a reaction to immunization (artificial or natural) with an antigen, where the immune response is capable of protecting the subject against subsequent challenges with the antigen or a pathology-related agent that includes the antigen.

[0463] In some embodiments, the bacterial vaccine described herein is used to treat an infection by Staphylococcus aureus. In some embodiments, the bacterial vaccine described herein is used to treat an infection by antibiotic resistant Staphylococcus aureus. In some embodiments, the bacterial vaccine described herein is used to treat an infection by Methicillin Resistant Staphylococcus aureus (MRSA).

[0464] Nosocomial infections are one of the most common and costly problems for the U.S. healthcare system, with S. aureus being the second-leading cause of such infections. MRSA is responsible for 40-50% of all nosocomially-acquired S. aureus infection. Further, recent studies indicate that S. aureus is also the major mediator of prosthetic implant infection. One of the most important mechanisms utilized by S. aureus to thwart the host immune response and develop into a persistent infection is through the formation of a highly-developed biofilm. A biofilm is a microbe-derived community in which bacterial cells are attached to a hydrated surface and embedded in a polysaccharide matrix. Bacteria in a biofilm exhibit an altered phenotype in their growth, gene expression, and protein production.

[0465] Accordingly, in some embodiments, the bacterial vaccines described herein prevent the establishment of biofilm-mediated chronic infections by S. aureus. In some embodiments, the antigen of interest if found in biofilm produced by S. aureus. Examples of such antigens are described in U.S. Pat. No. 9,265,820, herein incorporated by reference in its entirety. In some embodiments, the bacterial vaccine comprises at least one polypeptide expressed by a planktonic form of the bacteria, and at least one polypeptide expressed by the biofilm form of the bacteria.

[0466] In some embodiments, the bacterial antigen of interest is derived from S. aureus. Drug resistant S. aureus expresses a number of surface exposed proteins which are candidates as vaccine targets, as well as candidates as immunizing agents for preparation of antibodies that target S. aureus. Examples of such antigens are described in PCT Publication Nos. WO 2012/136653 and WO 2015/082536, and in Ramussen, K. et al, Vaccine, Vol. 34: 4602-4609 (2016), each of which are herein incorporated by reference in its entirety.

[0467] The skilled artisan will understand that the identity, number and size of the different S. aureus proteins that can be encoded by an mRNA for the bacterial vaccines described herein, may vary. For example, the vaccine may comprise mRNA encoding only portions of the full-length polypeptides. In some embodiments, the vaccine may comprise mRNA encoding a combination of portions and full-length polypeptides.

[0468] The identity of the planktonic- and biofilm-expressed polypeptides encoded by the mRNA included in the bacterial vaccines described herein is not particularly limited, but each is a polypeptide from a strain of S. aureus. In some embodiments, the polypeptide is exposed on the surface of the bacteria.

[0469] In one embodiment, the bacterial antigen is a multivalent antigen (i.e., the antigen comprises multiple antigenic epitopes, such as multiple antigenic peptides comprising different epitopes, such as a concatermeric antigen).

[0470] In another embodiment, the bacterial antigen is a Chlamydia antigen, such as a MOMP, OmpA, OmpL, OmpF or OprF antigen. Suitable Chlamydia antigens are described further in PCT Application No. PCT/US2016/058314, the entire contents of which is expressly incorporated herein by reference.

### Multivalent Vaccines

[0471] An immune potentiator construct can be used in combination with a multivalent antigen (i.e., the antigen comprises multiple antigenic epitopes, such as multiple antigenic peptides comprising different epitopes, such as a concatermeric antigen) to thereby enhance an immune response against the multivalent antigen. In one embodiment, the multivalent antigen is a cancer antigen. In another embodiment, the multivalent antigen is a bacterial antigen. For example, a multivalent antigen of interest (e.g., designed as described below) can be encoded by a chemically modified mRNA (mmRNA), provided on the same mmRNA as the immune potentiator construct or provided on a different mmRNA construct as the immune potentiator. The immune potentiator and multivalent antigen mmRNAs can be formulated (or coformulated) and administered (simultaneously or sequentially) to a subject in need thereof to stimulate an immune response against the multivalent antigen in the subject. Suitable multivalent antigens, including cancer antigens and bacterial antigens, for use with the immune potentiators are described herein.

[0472] In some embodiments, the mRNA vaccines described herein comprise an mRNA having an open reading frame encoding a concatemeric antigen comprised of 2-100 peptide epitopes.

[0473] In some embodiments, the concatemeric vaccines described herein may include multiple copies of a single neoepitope, multiple different neoepitopes based on a single type of mutation, i.e. point mutation, multiple different neoepitopes based on a variety of mutation types, neoepitopes and other antigens, such as tumor associated antigens or recall antigens.

[0474] In some embodiments the concatemeric antigen may include a recall antigen, also sometimes referred to as a memory antigen. A recall antigen is an antigen that has previously been encountered by an individual and for which there are pre-existent memory lymphocytes. In some embodiments the recall antigen may be an infectious disease antigen that the individual has likely encountered such as an influenza antigen. The recall antigen helps promote a more robust immune response.

[0475] In addition to peptide epitopes, the concatemeric antigen may have one or more targeting sequences. A targeting sequence, as used herein, refers to a peptide sequence that facilitates uptake of the peptide into intracellular compartments such as endosomes for processing and/or presentation within MHC class I or II determinants.

[0476] The targeting sequence may be present at the N-terminus and/or C-terminus of an epitope of the concatemeric antigen, either directly adjacent thereto or separated by a linker of a cleavage sensitive site. Targeting sequences have a variety of lengths, for instance 4-50 amino acids in length.

[0477] The targeting sequence may be, for instance, an endosomal targeting sequence. An endosomal targeting sequence is a sequence derived from an endosomal or lysosomal protein known to reside in MHC class II Ag processing compartments, such as invariant chain, lysosome-associated membrane proteins (LAMP1,4 LAMP2), and dendritic cell (DC)-LAMP or a sequence having at least 80% sequence identity thereto. Additionally, an exemplary nucleic acid encoding a MHC class I signal peptide fragment (78 bp, secretion signal (sec)) and the transmembrane and cytosolic domains including the stop-codon (MHC class I trafficking signal (MITD), 168 bp) both amplified from activated PBMC, may be used (sec sense, 5′-aag ctt agc ggc cgc acc atg cgg gtc acg gcg ccc cga acc-3′ (SEQ ID NO: 1314); sec antisense, 5′-ctg cag gga gcc ggc cca ggt ctc ggt cag-3′ (SEQ ID NO: 1315); MITD sense, 5′-gga tcc atc gtg ggc att gtt gct ggc ctg gct-3′ (SEQ ID NO: 1316); and MITD antisense, 5′-gaa ttc agt ctc gag tca agc tgt gag aga cac atc aga gcc-3′ (SEQ ID NO: 1317).

[0478] MHC Class I presentation is typically an inefficient process (only 1 peptide of 10,000 degraded molecules is actually presented). Priming of CD8 T cells with APCs provides insufficient densities of surface peptide/MHC I complexes results in weak responders exhibiting impaired cytokine secretion and a decreased memory pool. The methods described herein are capable of increasing the efficiency of MHC Class I presentation. MHC class I targeting sequences include MHC Class I trafficking signal (MITD) and PEST sequences (increase antigen-specific CD8 T cell responses presumably by targeting proteins for rapid degradation).

[0479] In some embodiments the mRNA vaccines can be combined with agents for promoting the production of antigen presenting cells (APCs), for instance, by converting non-APCs into Pseudo-APCs. Antigen presentation is a key step in the initiation, amplification and duration of an immune response. In this process fragments of antigens are presented through the Major Histocompatibility Complex (MHC) or Human Leukocyte Antigens (HLA) to T cells driving an antigen-specific immune response. For immune prophylaxis and therapy, enhancing this response is important for improved efficacy. The mRNA vaccines of the invention may be designed or enhanced to drive efficient antigen presentation. One method for enhancing APC processing and presentation, is to provide better targeting of the mRNA vaccines to antigen presenting cells (APC). Another approach involves activating the APC cells with immune-stimulatory formulations and/or components.

[0480] Alternatively, methods for reprograming non-APC into becoming APC may be used with the mRNA vaccines described herein. Importantly, most cells that take up mRNA formulations and are targets of their therapeutic actions are not APC. Therefore, designing a way to convert these cells into APC would be beneficial for efficacy. Methods and approaches for delivering RNA vaccines, e.g., mRNA vaccines to cells while also promoting the shift of a non-APC to an APC are provided herein. In some embodiments a mRNA encoding an APC reprograming molecule is included in the mRNA vaccine or coadministered with the mRNA vaccine.

[0481] An APC reprograming molecule, as used herein, is a molecule that promotes a transition in a non APC cell to an APC-like phenotype. An APC-like phenotype is property that enables MHC class II processing. Thus, an APC cell having an APC-like phenotype is a cell having one or more exogenous molecules (APC reprograming molecule) which has enhanced MHC class II processing capabilities in comparison to the same cell not having the one or more exogenous molecules. In some embodiments an APC reprograming molecule is a CIITA (a central regulator of MHC Class II expression); a chaperone protein such as CLIP, HLA-DO, HLA-DM etc. (enhancers of loading of antigen fragments into MHC Class II) and/or a costimulatory molecule like CD40, CD80, CD86 etc. (enhancers of T cell antigen recognition and T cell activation).

[0482] A CIITA protein is a transactivator that enhances activation of transcription of MHC Class II genes (Steimle et al., 1993, Cell 75:135-146) by interacting with a conserved set of DNA binding proteins that associate with the class II promoter region. The transcriptional activation function of CIITA has been mapped to an amino terminal acidic domain (amino acids 26-137). A nucleic acid molecule encoding a protein that interacts with CIITA, termed CIITA-interacting protein 104 (also referred to herein as CIP104). Both CITTA and CIP104 have been shown to enhance transcription from MHC class II promoters and thus are useful as APC reprograming molecule of the invention. In some embodiments the APC reprograming molecule are full length CIITA, CIP104 or other related molecules or active fragments thereof, such as amino acids 26-137 of CIITA, or amino acids having at least 80% sequence identity thereto and maintaining the ability to enhance activation of transcription of MHC Class II genes.

[0483] In some embodiments the APC reprograming molecule is delivered to a subject in the form of an mRNA encoding the APC reprograming molecule. As such the mRNA vaccines described herein may include an mRNA encoding an APC reprograming molecule. In some embodiments the mRNA in monocistronic. In other embodiments it is polycistronic. In some embodiments the mRNA encoding the one or more antigens is in a separate formulation from the mRNA encoding the APC reprograming molecule. In other embodiments the mRNA encoding the one or more antigens is in the same formulation as the mRNA encoding the APC reprograming molecule. In some embodiments the mRNA encoding the one or more antigens is administered to a subject at the same time as the mRNA encoding the APC reprograming molecule. In other embodiments the mRNA encoding the one or more antigens is administered to a subject at a different time than the mRNA encoding the APC reprograming molecule. For instance, the mRNA encoding the APC reprograming molecule may be administered prior to the mRNA encoding the one or more antigens. The mRNA encoding the APC reprograming molecule may be administered immediately prior to, at least 1 hour prior to, at least 1 day prior to, at least one week prior to, or at least one month prior to the mRNA encoding the antigens. Alternatively, the mRNA encoding the APC reprograming molecule may be administered after the mRNA encoding the one or more antigens. The mRNA encoding the APC reprograming molecule may be administered immediately after, at least 1 hour after, at least 1 day after, at least one week after, or at least one month after the mRNA encoding the antigens.

[0484] In other embodiments, the targeting sequence is a ubiquitination signal that is attached at either or both ends of the encoded peptide. In other embodiments, the targeting sequence is a ubiquitination signal that is attached at an internal site of the encoded peptide and/or to either end. Thus, the mRNA may include a nucleic acid sequence encoding a ubiquitination signal at either or both ends of the nucleotides encoding the concatemeric peptide. Ubiquitination, a post-translational modification, is the process of attaching ubiquitin to a substrate target protein. A ubiquitination signal is a peptide sequence which enables the targeting and processing of a peptide to one or more proteasomes. By targeting and processing the peptide through the use of a ubiquitination signal the intracellular processing of the peptide can more closely recapitulate antigen processing in Antigen Presenting Cells (APCs).

[0485] Ubiquitin is an 8.5 kDa regulatory protein that is found in nearly all tissues of eukaryotic organisms. In the human genome, there are four genes that produce ubiquitin: UBB, UBC, UBA52, and RPS27A. UBA52 and RPS27A code for a single copy of ubiquitin fused to the ribosomal proteins L40 and S27a, respectively. The UBB and UBC genes code for polyubiquitin precursor proteins. There are three steps to ubiquitination, performed by three enzymes. Ubiquitin-activating enzymes, also called E1 enzymes, modify the ubiquitin so that it is in a reactive state. The E1 binds to both ATP and ubiquitin, catalyzing the acyl-adenylation of ubiquitin's C-terminal. Then, the ubiquitin is transferred to an active site cysteine residue, releasing AMP. Ultimately, a thioester linkage is formed between the ubiquitin's C-terminal carboxyl group and the E1 cysteine sulfhydryl group. In the human genome, UBA1 and UBA6 are the two genes that code for the E1 enzymes.

[0486] The activated ubiquitin is then subjected to E2 ubiquitin-conjugating enzymes, which transfer the ubiquitin from E1 to the active site cysteine of the E2 via a trans(thio)esterification reaction. The E2 binds to both the activated ubiquitin and the E1 enzyme. Humans have 35 different E2 enzymes, characterized by their highly conserved structure, which is known as the ubiquitin-conjugating catalytic (UBC) fold. The E3 ubiquitin ligases facilitate the final step of the ubiquitination cascade. Generally, they create an isopeptide bond between a lysine of the target protein and the C-terminal glycine of ubiquitin. There are hundreds of E3 ligases; some also activate the E2 enzymes. E3 enzymes function as the substrate recognition modules of the system and interact with both the E2 and the substrate. The enzymes possess one of two domains: the homologous to the E6-AP carboxyl terminus (HECT) domain or the really interesting new gene (RING) domain (or the closely related, U-box domain). HECT domain E3 enzymes transiently bind ubiquitin when an obligate thioester intermediate is formed with the active-site cysteine of the E3, whereas RING domain E3 enzymes catalyze the direct transfer from the E2 enzyme to the substrate.

[0487] The number of ubiquitins added to the antigen can enhance the efficacy of the processing step. For instance, in polyubiquitination, additional ubiquitin molecules are added after the first has been attached to the peptide. The resulting ubiquitin chain is created by the linking of the glycine residue of the ubiquitin molecule to a lysine of the ubiquitin bound to the peptide. Each ubiquitin contains seven lysine residues and an N-terminal that can serve as sites for ubiquitination. When four or more ubiquitin molecules are attached to a lysine residue on the peptide antigen, the 26S proteasome recognizes the complex, internalizes it, and degrades the protein into small peptides.

[0488] Ubiquitin wild type has the following sequence (Homo sapiens):

[0489] MQIFVKTLTGKTITLEVEPSDTIENVKAKIQDKEGIPPDQQRLIFAGK QLEDGRTLSDYNIQKESTLHLVLRLRGG (SEQ ID NO: 1318)

[0490] The epitopes are connected in some embodiments by a cleavage sensitive site. A cleavage sensitive site is a peptide which is susceptible to cleavage by an enzyme or protease. These sites are also called protease cleavage sites. In some embodiments the protease is an intracellular enzyme. In some embodiments the protease is a protease found in an Antigen Presenting Cell (APC). Thus, protease cleavage sites correspond to high abundance (highly expressed) proteases in APCs. A cleavage sensitive site that is sensitive to an APC enzyme is referred to as an APC cleavage sensitive site. Proteases expressed in APCs include but are not limited to Cysteine proteases, such as: Cathepsin B, Cathepsin H, Cathepsin L, Cathepsin S, Cathepsin F, Cathepsin Z, Cathepsin V, Cathepsin O, Cathepsin C, and Cathepsin K, and Aspartic proteases such as Cathepsin D, Cathepsin E, and Asparaginyl endopeptidase.

[0491] The following are exemplary APC cleavage sensitive sites:

Cathepsin B: cleavage on the caboxyl side of Arg-Arg bonds
Cathepsin D has the following preferential cleavage sequences:

| P6 | P5 | P4 | P3 | P2 | P1 | ↓ | P1′ | P2′ | P3′ | P4′ |
|---|---|---|---|---|---|---|---|---|---|---|
| Xaa | Xaa | Xaa | Xaa | hydro | hydro | ↓ | hydro | Xaa | Xaa | Xaa |
| Xaa | Xaa | Xaa | Xaa | Glu | hydro | ↓ | hydro | Xaa | Xaa | Xaa, |

where Xaa = any amino acid residue, hydro = Ala, Val, Leu, Ile, Phe, Trp,
or Tyr, and ↓ = cleavage site
Cathepsin H: Arg-↓-NHMec; Bz-Arg-↓-NhNap; Bz-Arg-↓NHMec; Bz-
Phe-Cal-Arg-↓-NHMec; Pro-Gly-↓-Phe
Cathepsin S and F: Xaa-Xaa-Val-Val-Arg-Xaa-Xaa
where Xaa = any amino acid residue
Cathepsin V: Z-Phe-Arg-NHMec; Z-Leu-Arg-NHMec; Z-Val-Arg-NHMec
Cathepsin O: Z-Phe-Arg-NHMec and Z-Arg-Arg-NHMec
Cathepsin C has the following preferential cleavage sequences:

| 2 | 1 | 1′ | 2′ | 3′ | 4′ |
|---|---|---|---|---|---|
| ot Arg | ot Pro | ot Pro | aa | aa | aa |
| ot Lys | ot Pro | ot Pro | aa | aa | aa, |

| | where Xaa = any amino acid residue and ↓ = cleavage site | | | | | | | | | |
|---|---|---|---|---|---|---|---|---|---|---|
| | Cathepsin E: Arg-X, Glu-X, and Arg-Arg | | | | | | | | | |
| | Asparaginyl endopeptidase: after asparagine residues | | | | | | | | | |
| | Cathepsin L has the following preferential cleavage sequences: | | | | | | | | | |
| P6 | P5 | P4 | P3 | P2 | P1 | ↓ | P1′ | P2′ | P3′ | P4′ |
| Xaa | Xaa | Xaa | hydrophobic | Phe | Arg | ↓ | Xaa | Xaa | Xaa | Xaa |
| Xaa | Xaa | Xaa | aromatic | Phe | Arg | ↓ | Xaa | Xaa | Xaa | Xaa |
| Xaa | Xaa | Xaa | hydrophobic | Arg | Arg | ↓ | Xaa | Xaa | Xaa | Xaa |
| Xaa | Xaa | Xaa | aromatic | Arg | Arg | ↓ | Xaa | Xaa | Xaa | Xaa, |

where Xaa = any amino acid residue, hydrophobic = Ala, Val, Leu, Ile,
Phe, Trp, or Tyr, aromatic = Phe, Trp, His, or Tyr,
and ↓ = cleavage site

[0492] In some embodiments the cleavage sensitive site is a cathepsin B or S sensitive sites. Exemplary cathepsin B sensitive sites include, but are not limited to, those set forth in SEQ ID Nos: 226-615. Exemplary cathepsin S sensitive sites include, but are not limited to, those set forth in SEQ ID Nos: 616-1313.

[0493] In some embodiments, the mRNA cancer vaccines and vaccination methods include an mRNA encoding a concatemeric cancer antigen comprised of one or more neoepitopes and one or more traditional, cancer antigens. In some embodiments, the mRNA encodes 1, 2, 3, 4, 5, 6, 7, 8, 9, 10, 11, 12, 13, 14, 15, 16, 17, 18, 19, 20, or more traditional, cancer antigens in addition to the encoded neoepitopes.

[0494] In some embodiments the concatemeric antigen encodes 5-10 cancer peptide epitopes. In yet other embodiments the concatemeric antigen encodes 25-100 cancer peptide epitopes. In some embodiments the mRNA cancer vaccines and vaccination methods include epitopes or antigens based on specific mutations (neoepitopes) and those expressed by cancer-germline genes (antigens common to tumors found in multiple patients). In some embodiments, the mRNA cancer vaccines and vaccination methods include one or more traditional epitopes or antigens, e.g., one or more epitopes or antigens found in a traditional cancer vaccine.

[0495] The neoepitopes selected for inclusion in the concatemeric antigen typically will be high affinity binding peptides. The neoepitopes in the concatemeric construct may be the same or different, e.g., they vary by length, amino acid sequence or both.

[0496] In some embodiments, the neoepitopes are interspersed by linkers.

[0497] In some embodiments, the vaccine may be a polycistronic vaccine including multiple neoepitopes or one or more single mRNA vaccines or a combination thereof.

[0498] In some embodiments, the mRNA bacterial vaccines and vaccination methods include an mRNA encoding a concatemeric bacterial antigen comprised of one or more bacterial antigens. In some embodiments, the mRNA encodes 1, 2, 3, 4, 5, 6, 7, 8, 9, 10, 11, 12, 13, 14, 15, 16, 17, 18, 19, 20, or more bacterial antigens.

Compositions of Immune Potentiator mRNAs and Antigens of Interest

[0499] In another aspect, the disclosure provides a composition comprising at least one chemically modified messenger RNA (mmRNA) encoding: (i) at least one antigen of interest; and (ii) at least one polypeptide that enhances an immune response against the at least one antigen of interest when the at least on mmRNA is administered to a subject, wherein said mmRNA comprises one or more modified nucleobases. Thus, the disclosure provides compositions comprising at least one immune potentiator mRNA and at least one mRNA encoding an antigen of interest, wherein a single mRNA construct can encode both the antigen(s) or interest and the polypeptide that enhances an immune response to the antigen(s) or, alternatively, the composition can comprise two or more separate mRNA constructs, a first mRNA and a second mRNA, wherein the first mRNA encodes the at least one antigen of interest and the second mRNA encodes the polypeptide that enhances an immune response to the antigen(s) (i.e., the second mRNA comprises the immune potentiator).

[0500] In those embodiments comprising a first mRNA encoding an antigen(s) of interest and a second mRNA encoding the polypeptide that enhances an immune response to the antigen(s) of interest, the first mRNA and the second mRNAs can be coformulated together (e.g., prior to coadministration), such as coformulated in the same lipid nanoparticle.

[0501] In those embodiments comprising a single mRNA encoding both the antigen(s) of interest and the polypeptide that enhances an immune response to the antigen(s) of interest, the sequences encoding the polypeptide can be positioned on the mRNA construct either upstream or downstream of the sequences encoding the antigen of interest. For example, non-limiting examples of mRNA constructs encoding both an antigen and an immunostimulatory polypeptide include those encoding at least one mutant KRAS antigen and a constitutively active STING polypeptide, e.g., encoding an amino acid sequence shown in any one of SEQ ID NOs: 107-130. In one embodiment, the constitutively active STING polypeptide is located at the N-terminal end of the construct (i.e., upstream of the antigen-encoding sequences), as shown in SEQ ID NOs: 107-118. In another embodiment, the constitutively active STING polypeptide is located at the C-terminal end of the construct (i.e., downstream of the antigen-encoding sequences), as shown in SEQ ID NOs: 119-130.

[0502] Various mRNAs encoding antigens of interest (e.g., mRNA vaccines) that can be used in combination with an immune potentiator mRNA of the disclosure are described in further detail below.

Immunogenic Cell Death-Inducing mRNA Constructs

[0503] In another aspect, the disclosure provides mRNA constructs (e.g., mmRNAs) encoding polypeptides that induce immunogenic cell death, such as necroptosis or pyroptosis. The immunogenic cell death induced by the mRNAs results in release of cytosolic components from the cell such that an immune response against the cell is stimulated in vivo. Thus, the mRNAs of the invention can be used to stimulate an immune response in vivo against cells of interest, such as tumors in the treatment of cancer. An mRNA encoding a polypeptide that induces immunogenic cell death can be used alone or, alternatively, can be used in combination with one or more additional agents that stimulate or enhance immune responsiveness. Such additional agents include agents that stimulate adaptive immunity, such as stimulation of Type I interferon production, agents that induce T cell activation or priming and/or agents that modulate one or more immune checkpoints. Such additional agents can also be mRNAs or, alternatively, can be a different type of agent, such as a protein, antibody or small molecule. In one embodiment, the additional agent is one or more immune potentiator mRNA constructs of the disclosure.

[0504] Immunogenic cell death is distinguishable from non-immunogenic cell death in that immunogenic cell death results in release of intracellular components from the cell into the surrounding environment such that those components are made available for stimulation of an immune response. A number of intracellular components have been identified that typically are released during immunogenic cell death, referred to as “damage-associated molecular patterns” or DAMPs, including ATP, HMGB1, IL-1a, uric acid, DNA fragments, histones and mitochondrial content. DAMPs may be released extracellularly or certain DAMPs are translocated from the interior of the cell to the cell surface (e.g., calreticulin, which translocates from the lumen of the endoplasmic reticulum to the cell surface). Thus, release of DAMPs serves as an indicator of immunogenic cell death. Immunogenic cell death is also characterized by stimulation of pro-inflammatory cytokines.

[0505] Two types of immunogenic cell death are necroptosis and pyroptosis. Each of these types of programmed cell death has characteristic features that distinguish them from each other and from apoptosis, which is a form of programmed non-immunogenic cell death. Distinguishing characteristics of apoptosis are that it is caspase-dependent (e.g., dependent on initiator caspases such as caspase-8 and -10 for death receptor-induced apoptosis or caspase-9 for intrinsically-triggered apoptosis) and leads to cytoplasmic concentration and cell shrinkage, plasma membrane blebbing (but not loss of plasma membrane integrity), increased intracellular calcium concentration and mitochondrial outer membrane permeabilization (MOMP). Importantly, apoptosis does not result in release of intracellular components into the surrounding environment and is considered to be immunologically tolerogenic. In contrast, necroptosis is not dependent on caspase activity but is dependent on the activity of a kinase, referred to as Receptor Interacting Protein Kinase 1 (RIPK1). In fact, activation of caspases inhibits necroptosis, since, for example, activated caspase-8 and -10 inactivate RIPK1. When RIPK1 is activated, it interacts with RIPK3, leading to formation of the necrosome complex. Cell death by necroptosis is also dependent on Mixed Lineage Kinase Domain-Like protein (MLKL). Necroptosis is characterized by cellular collapse and loss of plasma membrane integrity, including release of DAMPs. Pyroptosis is also characterized by release of DAMPs, but differs from necroptosis in that it is dependent on gasdermin D (GSDMD), NLR family pyrin domain containing-3 (NLRP3; encodes crypyrin) and caspase 1, as well as caspase-4 and caspase-5 in humans and caspase-11 in mice, leading to induction of the inflammasome. Additional forms of caspase-independent immunogenic cell death that lead to plasma membrane rupture and inflammation include mitochondrial permeability transition-mediated regulated necrosis (MPT-RN), ferroptosis, parthanatos and NETosis (for review, see e.g., Linkermann, A. et al. (2014) Nat. Rev. Immunol. 14:759-767).

[0506] In one embodiment, the invention provides an mRNA encoding a polypeptide that induces necroptosis. In another embodiment, the invention provides an mRNA encoding a polypeptide that induces pyroptosis. In yet other embodiments, the invention provides an mRNA encoding a polypeptide that induces MPT-RN, ferroptosis, parthanatos or NETosis.

[0507] In one embodiment, the polypeptide that induces necroptosis is mixed lineage kinase domain-like protein (MLKL), or an immunogenic cell death-inducing fragment thereof. As described further in Examples 22-23, MLKL constructs induce necroptotic cell death, characterized by release of DAMPs. In one embodiment, the mRNA construct encodes amino acids 1-180 of human or mouse MLKL. In one embodiment, the MLKL construct comprises one or more miR binding sites. In one embodiment, the MLKL construct comprises a miR122 binding site, a miR142-3p binding site or both binding sites, for example in the 3′ UTR or in the 5′ UTR. Non-limiting examples of mRNA constructs encoding MLKL, or an immunogenic cell death-inducing fragment thereof, encode amino acids 1-180 of human or mouse MLKL comprising the amino sequences shown in SEQ ID NOs: 1327 and 1328, respectively.

[0508] In another embodiment, the polypeptide is receptor-interacting protein kinase 3 (RIPK3), or an immunogenic cell death-inducing fragment thereof. As described further in Example 24, RIPK3 constructs induce necroptotic cell death. In one embodiment, the mRNA construct encodes a RIPK3 polypeptide that multimerize with itself (homo-oligomerization). In one embodiment, the mRNA construct encodes a RIPK3 polypeptide that dimerizes with RIPK1. In one embodiment, the mRNA construct encodes the kinase domain and the RHIM domain of RIPK3. In one embodiment, the mRNA construct encodes the kinase domain of RIPK3, the RHIM domain of RIPK3 and two FKBP(F>V) domains. In one embodiment, the mRNA construct encodes a RIPK3 polypeptide (e.g., comprising the kinase domain and the RHIM domain of RIPK3) and an IZ domain (e.g., an IZ trimer). In one embodiment, the mRNA construct encodes a RIPK3 polypeptide (e.g., comprising the kinase domain and the RHIM domain of RIPK3) and one or more EE or RR domains (e.g., 2×EE domains, or 2×RR domains). Additionally, the structure of DNA constructs encoding RIPK3 constructs that induce immunogenic cell death are described further in, for example, Yatim, N. et al. (2015) Science 350:328-334 or Orozco, S. et al. (2014) Cell Death Differ. 21:1511-1521, and can be used in the design of suitable RNA constructs. In one embodiment, the RIPK3 construct comprises one or more miR binding sites. In one embodiment, the RIPK3 construct comprises a miR122 binding site, a miR142-3p binding site or both binding sites, e.g., in the 3′ UTR or the 5′ UTR. Non-limiting examples of mRNA constructs encoding RIPK3, or an immunogenic cell death-inducing fragment thereof, comprise an ORF having any of the amino acid sequences shown in SEQ ID NOs: 1329-1344.

[0509] In another embodiment, the polypeptide is receptor-interacting protein kinase 1 (RIPK1), or an immunogenic cell death-inducing fragment thereof. In one embodiment, the mRNA construct encodes amino acids 1-155 of a human or mouse RIPK1 polypeptide. In another embodiment, the mRNA construct encodes a RIPK1 polypeptide and an IZ domain. In another embodiment, the mRNA construct encodes a RIPK1 polypeptide and a DM domain. In one embodiment, the mRNA construct encodes a RIPK1 polypeptide and one or more EE or RR domains. Additionally, the structure of DNA constructs encoding RIPK1 constructs that induce immunogenic cell death are described further in, for example, Yatim, N. et al. (2015) Science 350:328-334 or Orozco, S. et al. (2014) Cell Death Differ. 21:1511-1521, and can be used in the design of suitable RNA constructs. In one embodiment, the RIPK1 construct comprises one or more miR binding sites. In one embodiment, the RIPK1 construct comprises a miR122 binding site, a miR142-3p binding site or both binding sites, e.g., in the 3′ UTR or in the 5′ UTR. Non-limiting examples of mRNA constructs encoding RIPK1, or an immunogenic cell death-inducing fragment thereof, comprise an ORF having any of the amino acid sequences shown in SEQ ID NOs: 158-163.

[0510] In another embodiment, the polypeptide is direct IAP binding protein with low pI (DIABLO) (also known as SMAC/DIABLO), or an immunogenic cell death-inducing fragment thereof. As described in the examples, DIABLO constructs induce cell death and release of cytokines. In one embodiment, the mRNA construct encodes a wild-type human DIABLO Isoform 1 sequence. In another embodiment, the mRNA construct encodes a human DIABLO Isoform 1 sequence comprising an S126L mutation. In another embodiment, the mRNA construct encodes amino acids 56-239 of human DIABLO Isoform 1. In another embodiment, the mRNA construct encodes amino acids 56-239 of human DIABLO Isoform 1 and comprises an S126L mutation. In another embodiment, the mRNA construct encodes a wild-type human DIABLO Isoform 3 sequence. In another embodiment, the mRNA construct encodes a human DIABLO Isoform 3 sequence comprising an S27L mutation. In another embodiment, the mRNA construct encodes amino acids 56-240 of human DIABLO Isoform 3. In another embodiment, the mRNA construct encodes amino acids 56-240 of human DIABLO Isoform 3 and comprises an S27L mutation. In one embodiment, the DIABLO construct comprises one or more miR binding sites. In one embodiment, the DIABLO construct comprises a miR122 binding site, a miR142-3p binding site or both binding sites, e.g., in the 3′ UTR or in the 5′ UTR. Non-limiting examples of mRNA constructs encoding DIABLO, or an immunogenic cell death-inducing fragment thereof, comprise an ORF having any of the amino acid sequences shown in SEQ ID NOs: 165-172.

[0511] In another embodiment, the polypeptide is FADD (Fas-associated protein with death domain), or an immunogenic cell death-inducing fragment thereof. In one embodiment, the FADD construct comprises one or more miR binding sites. In one embodiment, the FADD construct comprises a miR122 binding site, a miR142-3p binding site or both binding sites, e.g. in the 3′ UTR or in the 5′ UTR. Non-limiting examples of mRNA constructs encoding FADD, or an immunogenic cell death-inducing fragment thereof, comprise and ORF having any of the amino acid sequences shown in SEQ ID NOs: 1345-1351.

[0512] In another embodiment, the invention provides an mRNA encoding a polypeptide that induces pyroptosis. In one embodiment, the polypeptide is gasdermin D (GSDMD), or an immunogenic cell death-inducing fragment thereof. In one embodiment, the mRNA construct encodes a wild-type human GSDMD sequence. In another embodiment, the mRNA construct encodes amino acids 1-275 of human GSDMD. In another embodiment, the mRNA construct encodes amino acids 276-484 of human GSDMD. In another embodiment, the mRNA construct encodes wild-type mouse GSDMD. In another embodiment, the mRNA construct encodes amino acids 1-276 of mouse GSDMD. In another embodiment, the mRNA construct encodes encodes amino acids 277-487 of mouse GSDMD. In one embodiment, the GSDMD construct comprises one or more miR binding sites. In one embodiment, the GSDMD construct comprises a miR122 binding site, a miR142-3p binding site or both binding sites, e.g., in the 3′ UTR or in the 5′ UTR. Non-limiting examples of mRNA constructs encoding GSDMD, or an immunogenic cell-death inducing fragment thereof, encode any of the amino acid sequences shown in SEQ ID NOs: 1367-1372.

[0513] In another embodiment, the polypeptide is caspase-4 or caspase-5 or caspase-11, or an immunogenic cell death-inducing fragment thereof. In various embodiments, the caspase-4, -5 or -11 construct can encode (i) full-length wild-type caspase-4, caspase-5 or caspase-11; (ii) full-length caspase-4, -5 or -11 plus an IZ domain; (iii) N-terminally deleted caspase-4, -5 or -11 plus an IZ domain; (iv) full-length caspase-4, -5 or -11 plus a DM domain; or (v) N-terminally deleted caspase-4, -5 or -11 plus a DM domain. Examples of N-terminally deleted forms of caspase-4 and caspase-11 contain amino acid residues 81-377. An example of an N-terminally deleted form of caspase-5 contains amino acid residues 137-434. In one embodiment, the caspase-4, -5 or -11 construct comprises one or more miR binding sites. In one embodiment, the caspase-4, -5 or -11 construct comprises a miR122 binding site, a miR142-3p binding site or both binding sites, e.g., in the 3′ UTR or in the 5′ UTR. Non-limiting examples of mRNA constructs encoding caspase-4, or an immunogenic cell death-inducing fragment thereof, comprise an ORF having any of the amino acid sequences shown in SEQ ID NOs: 1352-1356. Non-limiting examples of mRNA constructs encoding caspase-5, or an immunogenic cell death-inducing fragment thereof, comprise an ORF having any of the amino acid sequences shown in SEQ ID NOs: 1357-1361. Non-limiting examples of mRNA constructs encoding caspase-11, or an immunogenic cell death-inducing fragment thereof, comprise an ORF having any of the amino acid sequences shown in SEQ ID NOs: 1362-1366.

[0514] In another embodiment, the polypeptide is NLRP3, or an immunogenic cell death-inducing fragment thereof. In one embodiment, the NLRP3 construct comprises one or more miR binding sites. In one embodiment, the NLRP3 construct comprises a miR122 binding site, a miR142-3p binding site or both binding sites, e.g., in the 3′ UTR or the 5′ UTR. Non-limiting examples of mRNA constructs encoding NLRP3, or an immunogenic cell death-inducing fragment thereof, encode the ORF amino acid sequences shown in SEQ ID NOs: 1373 or 1374.

[0515] In another embodiment, the polypeptide is apoptosis-associated speck-like protein containing a CARD (ASC/PYCARD), or an immunogenic cell death-inducing fragment thereof, such as a Pyrin domain. In one embodiment, the polypeptide is a Pyrin B30.2 domain. In another embodiment, the polypeptide is a Pyrin B30.2 domain comprising a V726A mutation. In one embodiment, the ASC/PYCARD or Pyrin construct comprises one or more miR binding sites. In one embodiment, the ASC/PYCARD or Pyrin construct comprises a miR122 binding site, a miR142-3p binding site or both binding sites, e.g., in the 3′ UTR or in the 5′ UTR. Non-limiting examples of mRNA constructs encoding a Pyrin B30.2 domain encode the ORF amino acid sequences shown in SEQ ID NOs: 1375 or 1376. Non-limiting examples of mRNA constructs encoding ASC encode the ORF amino acid sequences shown in SEQ ID NOs: 1377 or 1378.

[0516] The mRNAs of the invention encoding a polypeptide that induces immunogenic cell death can be used in combination with other agents that stimulate an immflammatory and/or immune reaction and/or regulate immunoresponsiveness. For an immune response against cancer cells to be effective in killing of the cancer cells, a number of events have been described that must occur in a stepwise fashion and be allowed to proceed and expand iteratively. This process has been referred to as the Cancer-Immunity Cycle (see e.g., Chen, D. S. and Mellman, I. (2013) Immunity, 39:1-10). These sequential events involve: (i) release of cancer cell antigens; (ii) cancer antigen presentation (e.g., by dendritic cells or other antigen presenting cells); (iii) priming and activation of T cells; (iv) trafficking of T cells (e.g., CTLs) to the tumor; (v) infiltration of T cells into the tumor; (vi) recognition of cancer cells by the T cells; and (vii) killing of the cancer cells.

[0517] Accordingly, another aspect of the invention pertains to additional agents that can be used in combination with an mRNA of the invention encoding a polypeptide that induces immunogenic cell death in order promote or enhance an immune response against cellular antigens of the cell targeted for killing. Such additional agents may stimulate or promote an inflammatory and/or immune response. Additionally or alternatively, such additional agents may regulate immune responsiveness, for example by acting as an immune checkpoint modulator. An additional agent can also be an mRNA, e.g., having structural properties as described herein for mRNA constructs (e.g., modified nucleobases, 5′ cap, 5′ UTR, 3′ UTR, miR binding site(s), polyA tail, as described herein). Alternatively, an additional agent can be a non-mRNA agent, such as a protein, antibody or small molecule.

[0518] In one embodiment, the additional agent potentiates an immune response, for example, induces adaptive immunity (e.g., by stimulating Type I interferon production), stimulates an inflammatory response, stimulates NFkB signaling and/or stimulates dendritic cell (DC) mobilization. In one embodiment, the agent that induces adaptive immunity is Type I interferon. For example, a pharmaceutical composition comprising Type I interferon can be used as the agent. Alternatively, in another embodiment, the additional agent that induces adaptive immunity is an agent that stimulates Type I interferon production. Non-limiting examples of agents that stimulate Type I interferon production include STING, IRF1, IRF3, IRF5, IRF6, IRF7 and IRF8. Non-limiting examples of agents that stimulate an inflammatory response include STAT1, STAT2, STAT4, STAT6, NFAT and C/EBPb. Non-limiting examples of agents that stimulate NFkB signaling include IKKβ, c-FLIP, RIPK1, IL-27, ApoF and PLP. A non-limiting example of an agent that stimulates DC mobilization is FLT3. Yet another agent that potentiates immune responses is DIABLO (SMAC/DIABLO).

[0519] In one embodiment, the agent that potentiates an immune response is an immune potentiator mRNA construct of the disclosure, non-limiting examples of which include constructs encoding STING, IRF3, IRF7, STAT6, Myd88, Btk(E41K), TAK-TAB1, DIABLO (SMAC/DIABLO), TRAM (TICAM2) polypeptide or a self-activating caspase-1 polypeptide, constitutively active IKKβ, constitutively active IKKα, c-FLIP and RIPK1 mRNA constructs.

[0520] In another embodiment, the additional agent induces T cell activation or priming. For example, the additional agent that induces T cell activation or priming can be a cytokine or a chemokine. Non-limiting examples of cytokines or chemokines that induce T cell activation or priming include IL-12, IL36g, CCL2, CCL4, CCL20 and CCL21. In one embodiment, the agent is a pharmaceutical composition that comprises the cytokine or chemokine. In another embodiment, the agent is one that induces production of the cytokine or chemokine. In another embodiment the agent is an mRNA construct encoding the cytokine or chemokine. In another embodiment, the agent is an mRNA construct encoding a polypeptide that induces the chemokine or cytokine.

[0521] In another embodiment, the additional agent modulates an immune checkpoint. Various immune checkpoint inhibitors have been described in the art, including PD-1 inhibitors, PD-L1 inhibitors and CTLA-4 inhibitors. Other modulators of immune checkpoints may target OX-40, OX-40L or ICOS. In one embodiment, an agent that modulates an immune checkpoint is an antibody. In another embodiment, an agent that modulates an immune checkpoint is a protein or small molecule modulator. In another embodiment, the agent (such as an mRNA) encodes an antibody modulator of an immune checkpoint.

[0522] In one embodiment, the additional agent that modulates an immune checkpoint targets PD-1. Non-limiting examples of immunotherapeutic agents that target PD-1 include pembrolizumab, alemtuzumab, atezolizumab, nivolumab, ipilimumab, pidilizumab, ofatumumab, rituximab, MEDI0680 and PDR001, AMP-224, PF-06801591, BGB-A317, REGN2810, SHR-1210, TSR-042, avelumab, durvalumab and affimer.

[0523] In one embodiment, the additional agent that modulates an immune checkpoint targets PD-L1. Non-limiting examples of immunotherapeutic agents that target PD-L1 include avelumab (MSB0010718C), atezolizumab (MPDL3280A), durvalumab (MEDI4736) and BMS936559.

[0524] In one embodiment, the additional agent that modulates an immune checkpoint targets CTLA-4. Non-limiting examples of immunotherapeutic agents that target CTLA-4 include ipilimumab, tremelimumab and AGEN1884.

[0525] In one embodiment, the additional agent that modulates an immune checkpoint targets OX-40 or OX-40L. In one embodiment, the agent that targets OX-40 or OX-40L is an mRNA construct encoding an Fc-OX-40L polypeptide. In yet other embodiments, the agent that targets OX-40 or OX-40L is an immunostimulatory agonist anti-OX-40 or OX-40L antibody, examples of which known in the art include MEDI6469 (agonist anti-OX40 antibody) and MOXR0916 (agonist anti-OX40 antibody).

[0526] In yet another embodiment, the additional agent that modulates an immune checkpoint is an ICOS pathway agonist.

mRNA Construct Components

[0527] An mRNA may be a naturally or non-naturally occurring mRNA. An mRNA may include one or more modified nucleobases, nucleosides, or nucleotides, as described below, in which case it may be referred to as a “modified mRNA” or “mmRNA.” As described herein “nucleoside” is defined as a compound containing a sugar molecule (e.g., a pentose or ribose) or derivative thereof in combination with an organic base (e.g., a purine or pyrimidine) or a derivative thereof (also referred to herein as “nucleobase”). As described herein, “nucleotide” is defined as a nucleoside including a phosphate group.

[0528] An mRNA may include a 5′ untranslated region (5′-UTR), a 3′ untranslated region (3′-UTR), and/or a coding region (e.g., an open reading frame). An exemplary 5′ UTR for use in the constructs is shown in SEQ ID NO: 21. Another exemplary 5′ UTR for use in the constructs is shown in SEQ ID NO: 1323. An exemplary 3′ UTR for use in the constructs is shown in SEQ ID NO: 22. An exemplary 3′ UTR comprising miR-122 and miR-142-3p binding sites for use in the constructs is shown in SEQ ID NO: 23. An mRNA may include any suitable number of base pairs, including tens (e.g., 10, 20, 30, 40, 50, 60, 70, 80, 90 or 100), hundreds (e.g., 200, 300, 400, 500, 600, 700, 800, or 900) or thousands (e.g., 1000, 2000, 3000, 4000, 5000, 6000, 7000, 8000, 9000, 10,000) of base pairs. Any number (e.g., all, some, or none) of nucleobases, nucleosides, or nucleotides may be an analog of a canonical species, substituted, modified, or otherwise non-naturally occurring. In certain embodiments, all of a particular nucleobase type may be modified.

[0529] In some embodiments, an mRNA as described herein may include a 5′ cap structure, a chain terminating nucleotide, optionally a Kozak sequence (also known as a Kozak consensus sequence), a stem loop, a polyA sequence, and/or a polyadenylation signal.

[0530] A 5′ cap structure or cap species is a compound including two nucleoside moieties joined by a linker and may be selected from a naturally occurring cap, a non-naturally occurring cap or cap analog, or an anti-reverse cap analog (ARCA). A cap species may include one or more modified nucleosides and/or linker moieties. For example, a natural mRNA cap may include a guanine nucleotide and a guanine (G) nucleotide methylated at the 7 position joined by a triphosphate linkage at their 5′ positions, e.g., m⁷G(5′)ppp(5′)G, commonly written as m⁷GpppG. A cap species may also be an anti-reverse cap analog. A non-limiting list of possible cap species includes m⁷GpppG, m⁷Gpppm⁷G, m⁷3′dGpppG, m₂^{7,O3′}GpppG, m₂^{7,O3′}GppppG, m₂^{7,O2′}GppppG, m⁷Gpppm⁷G, m⁷3′dGpppG, m₂^{7,O3′}GpppG, m₂^{7,O3′}GppppG, and m₂^{7,O2′}GppppG.

[0531] An mRNA may instead or additionally include a chain terminating nucleoside. For example, a chain terminating nucleoside may include those nucleosides deoxygenated at the 2′ and/or 3′ positions of their sugar group. Such species may include 3′-deoxyadenosine (cordycepin), 3′-deoxyuridine, 3′-deoxycytosine, 3′-deoxyguanosine, 3′-deoxythymine, and 2′,3′-dideoxynucleosides, such as 2′,3′-dideoxyadenosine, 2′,3′-dideoxyuridine, 2′,3′-dideoxycytosine, 2′,3′-dideoxyguanosine, and 2′,3′-dideoxythymine. In some embodiments, incorporation of a chain terminating nucleotide into an mRNA, for example at the 3′-terminus, may result in stabilization of the mRNA, as described, for example, in International Patent Publication No. WO 2013/103659.

[0532] An mRNA may instead or additionally include a stem loop, such as a histone stem loop. A stem loop may include 2, 3, 4, 5, 6, 7, 8, or more nucleotide base pairs. For example, a stem loop may include 4, 5, 6, 7, or 8 nucleotide base pairs. A stem loop may be located in any region of an mRNA. For example, a stem loop may be located in, before, or after an untranslated region (a 5′ untranslated region or a 3′ untranslated region), a coding region, or a polyA sequence or tail. In some embodiments, a stem loop may affect one or more function(s) of an mRNA, such as initiation of translation, translation efficiency, and/or transcriptional termination.

[0533] An mRNA may instead or additionally include a polyA sequence and/or polyadenylation signal. A polyA sequence may be comprised entirely or mostly of adenine nucleotides or analogs or derivatives thereof. A polyA sequence may be a tail located adjacent to a 3′ untranslated region of an mRNA. In some embodiments, a polyA sequence may affect the nuclear export, translation, and/or stability of an mRNA.

[0534] An mRNA may instead or additionally include a microRNA binding site.

[0535] In some embodiments, an mRNA is a bicistronic mRNA comprising a first coding region and a second coding region with an intervening sequence comprising an internal ribosome entry site (IRES) sequence that allows for internal translation initiation between the first and second coding regions, or with an intervening sequence encoding a self-cleaving peptide, such as a 2A peptide. IRES sequences and 2A peptides are typically used to enhance expression of multiple proteins from the same vector. A variety of IRES sequences are known and available in the art and may be used, including, e.g., the encephalomyocarditis virus IRES.

[0536] In one embodiment, the polynucleotides of the present disclosure may include a sequence encoding a self-cleaving peptide. The self-cleaving peptide may be, but is not limited to, a 2A peptide. A variety of 2A peptides are known and available in the art and may be used, including e.g., the foot and mouth disease virus (FMDV) 2A peptide, the equine rhinitis A virus 2A peptide, the Thosea asigna virus 2A peptide, and the porcine teschovirus-1 2A peptide. 2A peptides are used by several viruses to generate two proteins from one transcript by ribosome-skipping, such that a normal peptide bond is impaired at the 2A peptide sequence, resulting in two discontinuous proteins being produced from one translation event. As a non-limiting example, the 2A peptide may have the protein sequence: GSGATNFSLLKQAGDVEENPGP (SEQ ID NO: 24), fragments or variants thereof. In one embodiment, the 2A peptide cleaves between the last glycine and last proline. As another non-limiting example, the polynucleotides of the present disclosure may include a polynucleotide sequence encoding the 2A peptide having the protein sequence GSGATNFSLLKQAGDVEENPGP (SEQ ID NO: 24) fragments or variants thereof. One example of a polynucleotide sequence encoding the 2A peptide is: GGAAGCGGAGCTACTAACTTCAGCCTGCTGAAGCAGGCTGGAGACGTGGAGGAG AACCCTGGACCT (SEQ ID NO: 25). In one illustrative embodiment, a 2A peptide is encoded by the following sequence: 5′-TCCGGACTCAGATCCGGGGATCTCAAAATTGTCGCTCCTGTCAAACAAACTCTTA ACTTTGATTTACTCAAACTGGCTGGGGATGTAGAAAGCAATCCAGGTCCACTC-3′(SEQ ID NO: 26). The polynucleotide sequence of the 2A peptide may be modified or codon optimized by the methods described herein and/or are known in the art.

[0537] In one embodiment, this sequence may be used to separate the coding regions of two or more polypeptides of interest. As a non-limiting example, the sequence encoding the F2A peptide may be between a first coding region A and a second coding region B (A-F2Apep-B). The presence of the F2A peptide results in the cleavage of the one long protein between the glycine and the proline at the end of the F2A peptide sequence (NPGP is cleaved to result in NPG and P) thus creating separate protein A (with 21 amino acids of the F2A peptide attached, ending with NPG) and separate protein B (with 1 amino acid, P, of the F2A peptide attached). Likewise, for other 2A peptides (P2A, T2A and E2A), the presence of the peptide in a long protein results in cleavage between the glycine and proline at the end of the 2A peptide sequence (NPGP is cleaved to result in NPG and P). Protein A and protein B may be the same or different peptides or polypeptides of interest. In particular embodiments, protein A is a polypeptide that induces immunogenic cell death and protein B is another polypeptide that stimulates an inflammatory and/or immune response and/or regulates immune responsiveness (as described further below).

Modified mRNAs

[0538] While in certain embodiments an mRNA of the disclosure entirely comprises unmodified nucleobases, nucleosides or nucleotides, in some embodiments, an mRNA of the disclosure comprises one or more modified nucleobases, nucleosides, or nucleotides (termed “modified mRNAs” or “mmRNAs”). In some embodiments, modified mRNAs may have useful properties, including enhanced stability, intracellular retention, enhanced translation, and/or the lack of a substantial induction of the innate immune response of a cell into which the mRNA is introduced, as compared to a reference unmodified mRNA. Therefore, use of modified mRNAs may enhance the efficiency of protein production, intracellular retention of nucleic acids, as well as possess reduced immunogenicity.

[0539] In some embodiments, an mRNA includes one or more (e.g., 1, 2, 3 or 4) different modified nucleobases, nucleosides, or nucleotides. In some embodiments, an mRNA includes one or more (e.g., 1, 2, 3, 4, 5, 6, 7, 8, 9, 10, 20, 30, 40, 50, 60, 70, 80, 90, 100, or more) different modified nucleobases, nucleosides, or nucleotides. In some embodiments, the modified mRNA may have reduced degradation in a cell into which the mRNA is introduced, relative to a corresponding unmodified mRNA.

[0540] In some embodiments, the modified nucleobase is a modified uracil. Exemplary nucleobases and nucleosides having a modified uracil include pseudouridine (ψ), pyridin-4-one ribonucleoside, 5-aza-uridine, 6-aza-uridine, 2-thio-5-aza-uridine, 2-thio-uridine (s²U), 4-thio-uridine (s⁴U), 4-thio-pseudouridine, 2-thio-pseudouridine, 5-hydroxy-uridine (ho⁵U), 5-aminoallyl-uridine, 5-halo-uridine (e.g., 5-iodo-uridineor 5-bromo-uridine), 3-methyl-uridine (m³U), 5-methoxy-uridine (mo⁵U), uridine 5-oxyacetic acid (cmo⁵U), uridine 5-oxyacetic acid methyl ester (mcmo⁵U), 5-carboxymethyl-uridine (cm⁵U), 1-carboxymethyl-pseudouridine, 5-carboxyhydroxymethyl-uridine (chm⁵U), 5-carboxyhydroxymethyl-uridine methyl ester (mchm⁵U), 5-methoxycarbonylmethyl-uridine (mcm⁵U), 5-methoxycarbonylmethyl-2-thio-uridine (mcm⁵s²U), 5-aminomethyl-2-thio-uridine (nm⁵s²U), 5-methylaminomethyl-uridine (mnm⁵U), 5-methylaminomethyl-2-thio-uridine (mnm⁵s²U), 5-methylaminomethyl-2-seleno-uridine (mnm⁵se²U), 5-carbamoylmethyl-uridine (ncm⁵U), 5-carboxymethylaminomethyl-uridine (cmnm⁵U), 5-carboxymethylaminomethyl-2-thio-uridine (cmnm⁵s²U), 5-propynyl-uridine, 1-propynyl-pseudouridine, 5-taurinomethyl-uridine (τm⁵U), 1-taurinomethyl-pseudouridine, 5-taurinomethyl-2-thio-uridine (τm⁵s²U), 1-taurinomethyl-4-thio-pseudouridine, 5-methyl-uridine (m⁵U, i.e., having the nucleobase deoxythymine), 1-methyl-pseudouridine (m¹ψ), 5-methyl-2-thio-uridine (m⁵s²U), 1-methyl-4-thio-pseudouridine (m¹s⁴ψ), 4-thio-1-methyl-pseudouridine, 3-methyl-pseudouridine (m³ψ), 2-thiol-1-methyl-pseudouridine, 1-methyl-1-deaza-pseudouridine, 2-thio-1-methyl-1-deaza-pseudouridine, dihydrouridine (D), dihydropseudouridine, 5,6-dihydrouridine, 5-methyl-dihydrouridine (m⁵D), 2-thio-dihydrouridine, 2-thio-dihydropseudouridine, 2-methoxy-uridine, 2-methoxy-4-thio-uridine, 4-methoxy-pseudouridine, 4-methoxy-2-thio-pseudouridine, N1-methyl-pseudouridine, 3-(3-amino-3-carboxypropyl)uridine (acp³U), 1-methyl-3-(3-amino-3-carboxypropyl)pseudouridine (acp³ψ), 5-(isopentenylaminomethyl)uridine (inm⁵U), 5-(isopentenylaminomethyl)-2-thio-uridine (inm⁵s²U), α-thio-uridine, 2′-O-methyl-uridine (Um), 5,2′-O-dimethyl-uridine (m⁵Um), 2′-O-methyl-pseudouridine (ψm), 2-thio-2′-O-methyl-uridine (s²Um), 5-methoxycarbonylmethyl-2′-O-methyl-uridine (mcm⁵Um), 5-carbamoylmethyl-2′-O-methyl-uridine (ncm⁵Um), 5-carboxymethylaminomethyl-2′-O-methyl-uridine (cmnm⁵Um), 3,2′-O-dimethyl-uridine (m³Um), and 5-(isopentenylaminomethyl)-2′-O-methyl-uridine (inm⁵Um), 1-thio-uridine, deoxythymidine, 2′-F-ara-uridine, 2′-F-uridine, 2′-OH-ara-uridine, 5-(2-carbomethoxyvinyl) uridine, and 5-[3-(1-E-propenylamino)]uridine.

[0541] In some embodiments, the modified nucleobase is a modified cytosine. Exemplary nucleobases and nucleosides having a modified cytosine include 5-aza-cytidine, 6-aza-cytidine, pseudoisocytidine, 3-methyl-cytidine (m³C), N4-acetyl-cytidine (ac⁴C), 5-formyl-cytidine (f⁵C), N4-methyl-cytidine (m⁴C), 5-methyl-cytidine (m⁵C), 5-halo-cytidine (e.g., 5-iodo-cytidine), 5-hydroxymethyl-cytidine (hm⁵C), 1-methyl-pseudoisocytidine, pyrrolo-cytidine, pyrrolo-pseudoisocytidine, 2-thio-cytidine (s²C), 2-thio-5-methyl-cytidine, 4-thio-pseudoisocytidine, 4-thio-1-methyl-pseudoisocytidine, 4-thio-1-methyl-1-deaza-pseudoisocytidine, 1-methyl-1-deaza-pseudoisocytidine, zebularine, 5-aza-zebularine, 5-methyl-zebularine, 5-aza-2-thio-zebularine, 2-thio-zebularine, 2-methoxy-cytidine, 2-methoxy-5-methyl-cytidine, 4-methoxy-pseudoisocytidine, 4-methoxy-1-methyl-pseudoisocytidine, lysidine (k₂C), α-thio-cytidine, 2′-O-methyl-cytidine (Cm), 5,2′-O-dimethyl-cytidine (m⁵Cm), N4-acetyl-2′-O-methyl-cytidine (ac⁴Cm), N4,2′-O-dimethyl-cytidine (m⁴Cm), 5-formyl-2′-O-methyl-cytidine (f⁵Cm), N4,N4,2′-O-trimethyl-cytidine (m⁴₂Cm), 1-thio-cytidine, 2′-F-ara-cytidine, 2′-F-cytidine, and 2′-OH-ara-cytidine.

[0542] In some embodiments, the modified nucleobase is a modified adenine. Exemplary nucleobases and nucleosides having a modified adenine include α-thio-adenosine, 2-amino-purine, 2, 6-diaminopurine, 2-amino-6-halo-purine (e.g., 2-amino-6-chloro-purine), 6-halo-purine (e.g., 6-chloro-purine), 2-amino-6-methyl-purine, 8-azido-adenosine, 7-deaza-adenine, 7-deaza-8-aza-adenine, 7-deaza-2-amino-purine, 7-deaza-8-aza-2-amino-purine, 7-deaza-2,6-diaminopurine, 7-deaza-8-aza-2,6-diaminopurine, 1-methyl-adenosine (m¹A), 2-methyl-adenine (m²A), N6-methyl-adenosine (m⁶A), 2-methylthio-N6-methyl-adenosine (ms²m⁶A), N6-isopentenyl-adenosine (i⁶A), 2-methylthio-N6-isopentenyl-adenosine (ms² i⁶A), N6-(cis-hydroxyisopentenyl)adenosine (io⁶A), 2-methylthio-N6-(cis-hydroxyisopentenyl)adenosine (ms²io⁶A), N6-glycinylcarbamoyl-adenosine (g⁶A), N6-threonylcarbamoyl-adenosine (t⁶A), N6-methyl-N6-threonylcarbamoyl-adenosine (m⁶t⁶A), 2-methylthio-N6-threonylcarbamoyl-adenosine (ms²g⁶A), N6,N6-dimethyl-adenosine (m⁶₂A), N6-hydroxynorvalylcarbamoyl-adenosine (hn⁶A), 2-methylthio-N6-hydroxynorvalylcarbamoyl-adenosine (ms²hn⁶A), N6-acetyl-adenosine (ac⁶A), 7-methyl-adenine, 2-methylthio-adenine, 2-methoxy-adenine, α-thio-adenosine, 2′-O-methyl-adenosine (Am), N6,2′-O-dimethyl-adenosine (m⁶Am), N6,N6,2′-O-trimethyl-adenosine (m⁶₂Am), 1,2′-O-dimethyl-adenosine (m¹Am), 2′-O-ribosyladenosine (phosphate) (Ar(p)), 2-amino-N6-methyl-purine, 1-thio-adenosine, 8-azido-adenosine, 2′-F-ara-adenosine, 2′-F-adenosine, 2′-OH-ara-adenosine, and N6-(19-amino-pentaoxanonadecyl)-adenosine.

[0543] In some embodiments, the modified nucleobase is a modified guanine. Exemplary nucleobases and nucleosides having a modified guanine include α-thio-guanosine, inosine (I), 1-methyl-inosine (m¹I), wyosine (imG), methylwyosine (mimG), 4-demethyl-wyosine (imG-14), isowyosine (imG2), wybutosine (yW), peroxywybutosine (o₂yW), hydroxywybutosine (OhyW), undermodified hydroxywybutosine (OhyW*), 7-deaza-guanosine, queuosine (Q), epoxyqueuosine (oQ), galactosyl-queuosine (galQ), mannosyl-queuosine (manQ), 7-cyano-7-deaza-guanosine (preQ₀), 7-aminomethyl-7-deaza-guanosine (preQ₁), archaeosine (G⁺), 7-deaza-8-aza-guanosine, 6-thio-guanosine, 6-thio-7-deaza-guanosine, 6-thio-7-deaza-8-aza-guanosine, 7-methyl-guanosine (m⁷G), 6-thio-7-methyl-guanosine, 7-methyl-inosine, 6-methoxy-guanosine, 1-methyl-guanosine (m¹G), N2-methyl-guanosine (m²G), N2,N2-dimethyl-guanosine (m²₂G), N2,7-dimethyl-guanosine (m^{2,7}G), N2, N2,7-dimethyl-guanosine (m^{2,2,7}G), 8-oxo-guanosine, 7-methyl-8-oxo-guanosine, 1-methyl-6-thio-guanosine, N2-methyl-6-thio-guanosine, N2,N2-dimethyl-6-thio-guanosine, α-thio-guanosine, 2′-O-methyl-guanosine (Gm), N2-methyl-2′-O-methyl-guanosine (m²Gm), N2,N2-dimethyl-2′-O-methyl-guanosine (m²₂Gm), 1-methyl-2′-O-methyl-guanosine (m¹Gm), N2,7-dimethyl-2′-O-methyl-guanosine (m^{2,7}Gm), 2′-O-methyl-inosine (Im), 1,2′-O-dimethyl-inosine (m¹Im), 2′-O-ribosylguanosine (phosphate) (Gr(p)), 1-thio-guanosine, O6-methyl-guanosine, 2′-F-ara-guanosine, and 2′-F-guanosine.

[0544] In some embodiments, an mRNA of the disclosure includes a combination of one or more of the aforementioned modified nucleobases (e.g., a combination of 2, 3 or 4 of the aforementioned modified nucleobases).

[0545] In some embodiments, the modified nucleobase is pseudouridine (ψ), N1-methylpseudouridine (m¹ψ), 2-thiouridine, 4′-thiouridine, 5-methylcytosine, 2-thio-1-methyl-1-deaza-pseudouridine, 2-thio-1-methyl-pseudouridine, 2-thio-5-aza-uridine, 2-thio-dihydropseudouridine, 2-thio-dihydrouridine, 2-thio-pseudouridine, 4-methoxy-2-thio-pseudouridine, 4-methoxy-pseudouridine, 4-thio-1-methyl-pseudouridine, 4-thio-pseudouridine, 5-aza-uridine, dihydropseudouridine, 5-methoxyuridine, or 2′-O-methyl uridine. In some embodiments, an mRNA of the disclosure includes a combination of one or more of the aforementioned modified nucleobases (e.g., a combination of 2, 3 or 4 of the aforementioned modified nucleobases). In some embodiments, the modified nucleobase is N1-methylpseudouridine (m¹ψ) and the mRNA of the disclosure is fully modified with N1-methylpseudouridine (m¹ψ). In some embodiments, N1-methylpseudouridine (m¹ψ) represents from 75-100% of the uracils in the mRNA. In some embodiments, N1-methylpseudouridine (m¹ψ) represents 100% of the uracils in the mRNA.

[0546] In some embodiments, the modified nucleobase is a modified cytosine. Exemplary nucleobases and nucleosides having a modified cytosine include N4-acetyl-cytidine (ac⁴C), 5-methyl-cytidine (m⁵C), 5-halo-cytidine (e.g., 5-iodo-cytidine), 5-hydroxymethyl-cytidine (hm⁵C), 1-methyl-pseudoisocytidine, 2-thio-cytidine (s²C), 2-thio-5-methyl-cytidine. In some embodiments, an mRNA of the disclosure includes a combination of one or more of the aforementioned modified nucleobases (e.g., a combination of 2, 3 or 4 of the aforementioned modified nucleobases).

[0547] In some embodiments, the modified nucleobase is a modified adenine. Exemplary nucleobases and nucleosides having a modified adenine include 7-deaza-adenine, 1-methyl-adenosine (m¹A), 2-methyl-adenine (m²A), N6-methyl-adenosine (m⁶A). In some embodiments, an mRNA of the disclosure includes a combination of one or more of the aforementioned modified nucleobases (e.g., a combination of 2, 3 or 4 of the aforementioned modified nucleobases).

[0548] In some embodiments, the modified nucleobase is a modified guanine. Exemplary nucleobases and nucleosides having a modified guanine include inosine (I), 1-methyl-inosine (m¹I), wyosine (imG), methylwyosine (mimG), 7-deaza-guanosine, 7-cyano-7-deaza-guanosine (preQ₀), 7-aminomethyl-7-deaza-guanosine (preQ₁), 7-methyl-guanosine (m⁷G), 1-methyl-guanosine (m¹G), 8-oxo-guanosine, 7-methyl-8-oxo-guanosine. In some embodiments, an mRNA of the disclosure includes a combination of one or more of the aforementioned modified nucleobases (e.g., a combination of 2, 3 or 4 of the aforementioned modified nucleobases).

[0549] In some embodiments, the modified nucleobase is 1-methyl-pseudouridine (m¹ψ), 5-methoxy-uridine (mo⁵U), 5-methyl-cytidine (m⁵C), pseudouridine (ψ), α-thio-guanosine, or α-thio-adenosine. In some embodiments, an mRNA of the disclosure includes a combination of one or more of the aforementioned modified nucleobases (e.g., a combination of 2, 3 or 4 of the aforementioned modified nucleobases).

[0550] In some embodiments, the mRNA comprises pseudouridine (ψ). In some embodiments, the mRNA comprises pseudouridine (ψ) and 5-methyl-cytidine (m⁵C). In some embodiments, the mRNA comprises 1-methyl-pseudouridine (m¹ψ). In some embodiments, the mRNA comprises 1-methyl-pseudouridine (m¹ψ) and 5-methyl-cytidine (m⁵C). In some embodiments, the mRNA comprises 2-thiouridine (s²U). In some embodiments, the mRNA comprises 2-thiouridine and 5-methyl-cytidine (m⁵C). In some embodiments, the mRNA comprises 5-methoxy-uridine (mo⁵U). In some embodiments, the mRNA comprises 5-methoxy-uridine (mo⁵U) and 5-methyl-cytidine (m⁵C). In some embodiments, the mRNA comprises 2′-O-methyl uridine. In some embodiments, the mRNA comprises 2′-O-methyl uridine and 5-methyl-cytidine (m⁵C). In some embodiments, the mRNA comprises comprises N6-methyl-adenosine (m⁶A). In some embodiments, the mRNA comprises N6-methyl-adenosine (m⁶A) and 5-methyl-cytidine (m⁵C).

[0551] In certain embodiments, an mRNA of the disclosure is uniformly modified (i.e., fully modified, modified through-out the entire sequence) for a particular modification. For example, an mRNA can be uniformly modified with 5-methyl-cytidine (m⁵C), meaning that all cytosine residues in the mRNA sequence are replaced with 5-methyl-cytidine (m⁵C). Similarly, mRNAs of the disclosure can be uniformly modified for any type of nucleoside residue present in the sequence by replacement with a modified residue such as those set forth above.

[0552] In some embodiments, an mRNA of the disclosure may be modified in a coding region (e.g., an open reading frame encoding a polypeptide). In other embodiments, an mRNA may be modified in regions besides a coding region. For example, in some embodiments, a 5′-UTR and/or a 3′-UTR are provided, wherein either or both may independently contain one or more different nucleoside modifications. In such embodiments, nucleoside modifications may also be present in the coding region.

[0553] Examples of nucleoside modifications and combinations thereof that may be present in mmRNAs of the present disclosure include, but are not limited to, those described in PCT Patent Application Publications: WO2012045075, WO2014081507, WO2014093924, WO2014164253, and WO2014159813.

[0554] The mmRNAs of the disclosure can include a combination of modifications to the sugar, the nucleobase, and/or the internucleoside linkage. These combinations can include any one or more modifications described herein.

[0555] Examples of modified nucleosides and modified nucleoside combinations are provided below in Table 1 and Table 2. These combinations of modified nucleotides can be used to form the mmRNAs of the disclosure. In certain embodiments, the modified nucleosides may be partially or completely substituted for the natural nucleotides of the mRNAs of the disclosure. As a non-limiting example, the natural nucleotide uridine may be substituted with a modified nucleoside described herein. In another non-limiting example, the natural nucleoside uridine may be partially substituted (e.g., about 0.1%, 1%, 5%, 10%, 15%, 20%, 25%, 30%, 35%, 40%, 45%, 50%, 55%, 60%, 65%, 70%, 75%, 80%, 85%, 90%, 95% or 99.9% of the natural uridines) with at least one of the modified nucleoside disclosed herein.

TABLE 1
Combinations of Nucleoside Modifications

| Modified Nucleotide | Modified Nucleotide Combination |
|---|---|
| α-thio-cytidine | α-thio-cytidine/5-iodo-uridine |
| | α-thio-cytidine/N1-methyl-pseudouridine |
| | α-thio-cytidine/α-thio-uridine |
| | α-thio-cytidine/5-methyl-uridine |
| | α-thio-cytidine/pseudo-uridine |
| | about 50% of the cytosines are α-thio-cytidine |
| pseudoisocytidine | pseudoisocytidine/5-iodo-uridine |
| | pseudoisocytidine/N1-methyl-pseudouridine |
| | pseudoisocytidine/α-thio-uridine |
| | pseudoisocytidine/5-methyl-uridine |
| | pseudoisocytidine/pseudouridine |
| | about 25% of cytosines are pseudoisocytidine |
| | pseudoisocytidine/about 50% of uridines are N1- |
| | methyl-pseudouridine and about 50% of uridines |
| | are pseudouridine |
| | pseudoisocytidine/about 25% of uridines are N1- |
| | methyl-pseudouridine and about 25% of uridines |
| | are pseudouridine |
| pyrrolo-cytidine | pyrrolo-cytidine/5-iodo-uridine |
| | pyrrolo-cytidine/N1-methyl-pseudouridine |
| | pyrrolo-cytidine/α-thio-uridine |
| | pyrrolo-cytidine/5-methyl-uridine |
| | pyrrolo-cytidine/pseudouridine |
| | about 50% of the cytosines are pyrrolo-cytidine |
| 5-methyl-cytidine | 5-methyl-cytidine/5-iodo-uridine |
| | 5-methyl-cytidine/N1-methyl-pseudouridine |
| | 5-methyl-cytidine/α-thio-uridine |
| | 5-methyl-cytidine/5-methyl-uridine |
| | 5-methyl-cytidine/pseudouridine |
| | about 25% of cytosines are 5-methyl-cytidine |
| | about 50% of cytosines are 5-methyl-cytidine |
| | 5-methyl-cytidine/5-methoxy-uridine |
| | 5-methyl-cytidine/5-bromo-uridine |
| | 5-methyl-cytidine/2-thio-uridine |
| | 5-methyl-cytidine/about 50% of uridines are 2- |
| | thio-uridine |
| | about 50% of uridines are 5-methyl-cytidine/about |
| | 50% of uridines are 2-thio-uridine |
| N4-acetyl-cytidine | N4-acetyl-cytidine/5-iodo-uridine |
| | N4-acetyl-cytidine/N1-methyl-pseudouridine |
| | N4-acetyl-cytidine/α-thio-uridine |
| | N4-acetyl-cytidine/5-methyl-uridine |
| | N4-acetyl-cytidine/pseudouridine |
| | about 50% of cytosines are N4-acetyl-cytidine |
| | about 25% of cytosines are N4-acetyl-cytidine |
| | N4-acetyl-cytidine/5-methoxy-uridine |
| | N4-acetyl-cytidine/5-bromo-uridine |
| | N4-acetyl-cytidine/2-thio-uridine |
| | about 50% of cytosines are N4-acetyl-cytidine/ |
| | about 50% of uridines are 2-thio-uridine |

TABLE 2
Modified Nucleosides and Combinations Thereof

1-(2,2,2-Trifluoroethyl)pseudo-UTP
1-Ethyl-pseudo-UTP
1-Methyl-pseudo-U-alpha-thio-TP
1-methyl-pseudouridine TP, ATP, GTP, CTP
1-methyl-pseudo-UTP/5-methyl-CTP/ATP/GTP
1-methyl-pseudo-UTP/CTP/ATP/GTP
1-Propyl-pseudo-UTP
25% 5-Aminoallyl-CTP + 75% CTP/25% 5-Methoxy-UTP + 75% UTP
25% 5-Aminoallyl-CTP + 75% CTP/75% 5-Methoxy-UTP + 25% UTP
25% 5-Bromo-CTP + 75% CTP/25% 5-Methoxy-UTP + 75% UTP
25% 5-Bromo-CTP + 75% CTP/75% 5-Methoxy-UTP + 25% UTP
25% 5-Bromo-CTP + 75% CTP/1-Methyl-pseudo-UTP
25% 5-Carboxy-CTP + 75% CTP/25% 5-Methoxy-UTP + 75% UTP
25% 5-Carboxy-CTP + 75% CTP/75% 5-Methoxy-UTP + 25% UTP
25% 5-Ethyl-CTP + 75% CTP/25% 5-Methoxy-UTP + 75% UTP
25% 5-Ethyl-CTP + 75% CTP/75% 5-Methoxy-UTP + 25% UTP
25% 5-Ethynyl-CTP + 75% CTP/25% 5-Methoxy-UTP + 75% UTP
25% 5-Ethynyl-CTP + 75% CTP/75% 5-Methoxy-UTP + 25% UTP
25% 5-Fluoro-CTP + 75% CTP/25% 5-Methoxy-UTP + 75% UTP
25% 5-Fluoro-CTP + 75% CTP/75% 5-Methoxy-UTP + 25% UTP
25% 5-Formyl-CTP + 75% CTP/25% 5-Methoxy-UTP + 75% UTP
25% 5-Formyl-CTP + 75% CTP/75% 5-Methoxy-UTP + 25% UTP
25% 5-Hydroxymethyl-CTP + 75% CTP/25% 5-Methoxy-UTP + 75%
UTP
25% 5-Hydroxymethyl-CTP + 75% CTP/75% 5-Methoxy-UTP + 25%
UTP
25% 5-Iodo-CTP + 75% CTP/25% 5-Methoxy-UTP + 75% UTP
25% 5-Iodo-CTP + 75% CTP/75% 5-Methoxy-UTP + 25% UTP
25% 5-Methoxy-CTP + 75% CTP/25% 5-Methoxy-UTP + 75% UTP
25% 5-Methoxy-CTP + 75% CTP/75% 5-Methoxy-UTP + 25% UTP
25% 5-Methyl-CTP + 75% CTP/25% 5-Methoxy-UTP + 75% 1-Methyl-
pseudo-UTP
25% 5-Methyl-CTP + 75% CTP/25% 5-Methoxy-UTP + 75% UTP
25% 5-Methyl-CTP + 75% CTP/50% 5-Methoxy-UTP + 50% 1-Methyl-
pseudo-UTP
25% 5-Methyl-CTP + 75% CTP/50% 5-Methoxy-UTP + 50% UTP
25% 5-Methyl-CTP + 75% CTP/5-Methoxy-UTP
25% 5-Methyl-CTP + 75% CTP/75% 5-Methoxy-UTP + 25% 1-Methyl-
pseudo-UTP
25% 5-Methyl-CTP + 75% CTP/75% 5-Methoxy-UTP + 25% UTP
25% 5-Phenyl-CTP + 75% CTP/25% 5-Methoxy-UTP + 75% UTP
25% 5-Phenyl-CTP + 75% CTP/75% 5-Methoxy-UTP + 25% UTP
25% 5-Trifluoromethyl-CTP + 75% CTP/25% 5-Methoxy-UTP + 75%
UTP
25% 5-Trifluoromethyl-CTP + 75% CTP/75% 5-Methoxy-UTP + 25%
UTP
25% 5-Trifluoromethyl-CTP + 75% CTP/1-Methyl-pseudo-UTP
25% N4-Ac-CTP + 75% CTP/25% 5-Methoxy-UTP + 75% UTP
25% N4-Ac-CTP + 75% CTP/75% 5-Methoxy-UTP + 25% UTP
25% N4-Bz-CTP + 75% CTP/25% 5-Methoxy-UTP + 75% UTP
25% N4-Bz-CTP + 75% CTP/75% 5-Methoxy-UTP + 25% UTP
25% N4-Methyl-CTP + 75% CTP/25% 5-Methoxy-UTP + 75% UTP
25% N4-Methyl-CTP + 75% CTP/75% 5-Methoxy-UTP + 25% UTP
25% Pseudo-iso-CTP + 75% CTP/25% 5-Methoxy-UTP + 75% UTP
25% Pseudo-iso-CTP + 75% CTP/75% 5-Methoxy-UTP + 25% UTP
25% 5-Bromo-CTP/75% CTP/Pseudo-UTP
25% 5-methoxy-UTP/25% 5-methyl-CTP/ATP/GTP
25% 5-methoxy-UTP/5-methyl-CTP/ATP/GTP
25% 5-methoxy-UTP/75% 5-methyl-CTP/ATP/GTP
25% 5-methoxy-UTP/CTP/ATP/GTP
25% 5-metoxy-UTP/50% 5-methyl-CTP/ATP/GTP
2-Amino-ATP
2-Thio-CTP
2-thio-pseudouridine TP, ATP, GTP, CTP
2-Thio-pseudo-UTP
2-Thio-UTP
3-Methyl-CTP
3-Methyl-pseudo-UTP
4-Thio-UTP
50% 5-Bromo-CTP + 50% CTP/1-Methyl-pseudo-UTP
50% 5-Hydroxymethyl-CTP + 50% CTP/1-Methyl-pseudo-UTP
50% 5-methoxy-UTP/5-methyl-CTP/ATP/GTP
50% 5-Methyl-CTP + 50% CTP/25% 5-Methoxy-UTP + 75% 1-Methyl-
pseudo-UTP
50% 5-Methyl-CTP + 50% CTP/25% 5-Methoxy-UTP + 75% UTP
50% 5-Methyl-CTP + 50% CTP/50% 5-Methoxy-UTP + 50% 1-Methyl-
pseudo-UTP
50% 5-Methyl-CTP + 50% CTP/50% 5-Methoxy-UTP + 50% UTP
50% 5-Methyl-CTP + 50% CTP/5-Methoxy-UTP
50% 5-Methyl-CTP + 50% CTP/75% 5-Methoxy-UTP + 25% 1-Methyl-
pseudo-UTP
50% 5-Methyl-CTP + 50% CTP/75% 5-Methoxy-UTP + 25% UTP
50% 5-Trifluoromethyl-CTP + 50% CTP/1-Methyl-pseudo-UTP
50% 5-Bromo-CTP/50% CTP/Pseudo-UTP
50% 5-methoxy-UTP/25% 5-methyl-CTP/ATP/GTP
50% 5-methoxy-UTP/50% 5-methyl-CTP/ATP/GTP
50% 5-methoxy-UTP/75% 5-methyl-CTP/ATP/GTP
50% 5-methoxy-UTP/CTP/ATP/GTP
5-Aminoallyl-CTP
5-Aminoallyl-CTP/5-Methoxy-UTP
5-Aminoallyl-UTP
5-Bromo-CTP
5-Bromo-CTP/5-Methoxy-UTP
5-Bromo-CTP/1-Methyl-pseudo-UTP
5-Bromo-CTP/Pseudo-UTP
5-bromocytidine TP, ATP, GTP, UTP
5-Bromo-UTP
5-Carboxy-CTP/5-Methoxy-UTP
5-Ethyl-CTP/5-Methoxy-UTP
5-Ethynyl-CTP/5-Methoxy-UTP
5-Fluoro-CTP/5-Methoxy-UTP
5-Formyl-CTP/5-Methoxy-UTP
5-Hydroxy-methyl-CTP/5-Methoxy-UTP
5-Hydroxymethyl-CTP
5-Hydroxymethyl-CTP/1-Methyl-pseudo-UTP
5-Hydroxymethyl-CTP/5-Methoxy-UTP
5-hydroxymethyl-cytidine TP, ATP, GTP, UTP
5-Iodo-CTP/5-Methoxy-UTP
5-Me-CTP/5-Methoxy-UTP
5-Methoxy carbonyl methyl-UTP
5-Methoxy-CTP/5-Methoxy-UTP
5-methoxy-uridine TP, ATP, GTP, UTP
5-methoxy-UTP
5-Methoxy-UTP
5-Methoxy-UTP/N6-Isopentenyl-ATP
5-methoxy-UTP/25% 5-methyl-CTP/ATP/GTP
5-methoxy-UTP/5-methyl-CTP/ATP/GTP
5-methoxy-UTP/75% 5-methyl-CTP/ATP/GTP
5-methoxy-UTP/CTP/ATP/GTP
5-Methyl-2-thio-UTP
5-Methylaminomethyl-UTP
5-Methyl-CTP/5-Methoxy-UTP
5-Methyl-CTP/5-Methoxy-UTP(cap 0)
5-Methyl-CTP/5-Methoxy-UTP(No cap)
5-Methyl-CTP/25% 5-Methoxy-UTP + 75% 1-Methyl-pseudo-UTP
5-Methyl-CTP/25% 5-Methoxy-UTP + 75% UTP
5-Methyl-CTP/50% 5-Methoxy-UTP + 50% 1-Methyl-pseudo-UTP
5-Methyl-CTP/50% 5-Methoxy-UTP + 50% UTP
5-Methyl-CTP/5-Methoxy-UTP/N6-Me-ATP
5-Methyl-CTP/75% 5-Methoxy-UTP + 25% 1-Methyl-pseudo-UTP
5-Methyl-CTP/75% 5-Methoxy-UTP + 25% UTP
5-Phenyl-CTP/5-Methoxy-UTP
5-Trifluoro-methyl-CTP/5-Methoxy-UTP
5-Trifluoromethyl-CTP
5-Trifluoromethyl-CTP/5-Methoxy-UTP
5-Trifluoromethyl-CTP/1-Methyl-pseudo-UTP
5-Trifluoromethyl-CTP/Pseudo-UTP
5-Trifluoromethyl-UTP
5-trifluromethylcytidine TP, ATP, GTP, UTP
75% 5-Aminoallyl-CTP + 25% CTP/25% 5-Methoxy-UTP + 75% UTP
75% 5-Aminoallyl-CTP + 25% CTP/75% 5-Methoxy-UTP + 25% UTP
75% 5-Bromo-CTP + 25% CTP/25% 5-Methoxy-UTP + 75% UTP
75% 5-Bromo-CTP + 25% CTP/75% 5-Methoxy-UTP + 25% UTP
75% 5-Carboxy-CTP + 25% CTP/25% 5-Methoxy-UTP + 75% UTP
75% 5-Carboxy-CTP + 25% CTP/75% 5-Methoxy-UTP + 25% UTP
75% 5-Ethyl-CTP + 25% CTP/25% 5-Methoxy-UTP + 75% UTP
75% 5-Ethyl-CTP + 25% CTP/75% 5-Methoxy-UTP + 25% UTP
75% 5-Ethynyl-CTP + 25% CTP/25% 5-Methoxy-UTP + 75% UTP
75% 5-Ethynyl-CTP + 25% CTP/75% 5-Methoxy-UTP + 25% UTP
75% 5-Fluoro-CTP + 25% CTP/25% 5-Methoxy-UTP + 75% UTP
75% 5-Fluoro-CTP + 25% CTP/75% 5-Methoxy-UTP + 25% UTP
75% 5-Formyl-CTP + 25% CTP/25% 5-Methoxy-UTP + 75% UTP
75% 5-Formyl-CTP + 25% CTP/75% 5-Methoxy-UTP + 25% UTP
75% 5-Hydroxymethyl-CTP + 25% CTP/25% 5-Methoxy-UTP + 75%
UTP
75% 5-Hydroxymethyl-CTP + 25% CTP/75% 5-Methoxy-UTP + 25%
UTP
75% 5-Iodo-CTP + 25% CTP/25% 5-Methoxy-UTP + 75% UTP
75% 5-Iodo-CTP + 25% CTP/75% 5-Methoxy-UTP + 25% UTP
75% 5-Methoxy-CTP + 25% CTP/25% 5-Methoxy-UTP + 75% UTP
75% 5-Methoxy-CTP + 25% CTP/75% 5-Methoxy-UTP + 25% UTP
75% 5-methoxy-UTP/5-methyl-CTP/ATP/GTP
75% 5-Methyl-CTP + 25% CTP/25% 5-Methoxy-UTP + 75% 1-Methyl-
pseudo-UTP
75% 5-Methyl-CTP + 25% CTP/25% 5-Methoxy-UTP + 75% UTP
75% 5-Methyl-CTP + 25% CTP/50% 5-Methoxy-UTP + 50% 1-Methyl-
pseudo-UTP
75% 5-Methyl-CTP + 25% CTP/50% 5-Methoxy-UTP + 50% UTP
75% 5-Methyl-CTP + 25% CTP/5-Methoxy-UTP
75% 5-Methyl-CTP + 25% CTP/75% 5-Methoxy-UTP + 25% 1-Methyl-
pseudo-UTP
75% 5-Methyl-CTP + 25% CTP/75% 5-Methoxy-UTP + 25% UTP
75% 5-Phenyl-CTP + 25% CTP/25% 5-Methoxy-UTP + 75% UTP
75% 5-Phenyl-CTP + 25% CTP/75% 5-Methoxy-UTP + 25% UTP
75% 5-Trifluoromethyl-CTP + 25% CTP/25% 5-Methoxy-UTP + 75%
UTP
75% 5-Trifluoromethyl-CTP + 25% CTP/75% 5-Methoxy-UTP + 25%
UTP
75% 5-Trifluoromethyl-CTP + 25% CTP/1-Methyl-pseudo-UTP
75% N4-Ac-CTP + 25% CTP/25% 5-Methoxy-UTP + 75% UTP
75% N4-Ac-CTP + 25% CTP/75% 5-Methoxy-UTP + 25% UTP
75% N4-Bz-CTP + 25% CTP/25% 5-Methoxy-UTP + 75% UTP
75% N4-Bz-CTP + 25% CTP/75% 5-Methoxy-UTP + 25% UTP
75% N4-Methyl-CTP + 25% CTP/25% 5-Methoxy-UTP + 75% UTP
75% N4-Methyl-CTP + 25% CTP/75% 5-Methoxy-UTP + 25% UTP
75% Pseudo-iso-CTP + 25% CTP/25% 5-Methoxy-UTP + 75% UTP
75% Pseudo-iso-CTP + 25% CTP/75% 5-Methoxy-UTP + 25% UTP
75% 5-Bromo-CTP/25% CTP/1-Methyl-pseudo-UTP
75% 5-Bromo-CTP/25% CTP/Pseudo-UTP
75% 5-methoxy-UTP/25% 5-methyl-CTP/ATP/GTP
75% 5-methoxy-UTP/50% 5-methyl-CTP/ATP/GTP
75% 5-methoxy-UTP/75% 5-methyl-CTP/ATP/GTP
75% 5-methoxy-UTP/CTP/ATP/GTP
8-Aza-ATP
Alpha-thio-CTP
CTP/25% 5-Methoxy-UTP + 75% 1-Methyl-pseudo-UTP
CTP/25% 5-Methoxy-UTP + 75% UTP
CTP/50% 5-Methoxy-UTP + 50% 1-Methyl-pseudo-UTP
CTP/50% 5-Methoxy-UTP + 50% UTP
CTP/5-Methoxy-UTP
CTP/5-Methoxy-UTP (cap 0)
CTP/5-Methoxy-UTP(No cap)
CTP/75% 5-Methoxy-UTP + 25% 1-Methyl-pseudo-UTP
CTP/75% 5-Methoxy-UTP + 25% UTP
CTP/UTP(No cap)
N1-Me-GTP
N4-Ac-CTP
N4Ac-CTP/1-Methyl-pseudo-UTP
N4Ac-CTP/5-Methoxy-UTP
N4-acetyl-cytidine TP, ATP, GTP, UTP
N4-Bz-CTP/5-Methoxy-UTP
N4-methyl CTP
N4-Methyl-CTP/5-Methoxy-UTP
Pseudo-iso-CTP/5-Methoxy-UTP
PseudoU-alpha-thio-TP
pseudouridine TP, ATP, GTP, CTP
pseudo-UTP/5-methyl-CTP/ATP/GTP
UTP-5-oxyacetic acid Me ester
Xanthosine

[0556] According to the disclosure, polynucleotides of the disclosure may be synthesized to comprise the combinations or single modifications of Table 1 or Table 2.

[0557] Where a single modification is listed, the listed nucleoside or nucleotide represents 100 percent of that A, U, G or C nucleotide or nucleoside having been modified. Where percentages are listed, these represent the percentage of that particular A, U, G or C nucleobase triphosphate of the total amount of A, U, G, or C triphosphate present. For example, the combination: 25% 5-Aminoallyl-CTP+75% CTP/25% 5-Methoxy-UTP+75% UTP refers to a polynucleotide where 25% of the cytosine triphosphates are 5-Aminoallyl-CTP while 75% of the cytosines are CTP; whereas 25% of the uracils are 5-methoxy UTP while 75% of the uracils are UTP. Where no modified UTP is listed then the naturally occurring ATP, UTP, GTP and/or CTP is used at 100% of the sites of those nucleotides found in the polynucleotide. In this example all of the GTP and ATP nucleotides are left unmodified.

[0558] The mRNAs of the present disclosure, or regions thereof, may be codon optimized. Codon optimization methods are known in the art and may be useful for a variety of purposes: matching codon frequencies in host organisms to ensure proper folding, bias GC content to increase mRNA stability or reduce secondary structures, minimize tandem repeat codons or base runs that may impair gene construction or expression, customize transcriptional and translational control regions, insert or remove proteins trafficking sequences, remove/add post translation modification sites in encoded proteins (e.g., glycosylation sites), add, remove or shuffle protein domains, insert or delete restriction sites, modify ribosome binding sites and mRNA degradation sites, adjust translation rates to allow the various domains of the protein to fold properly, or to reduce or eliminate problem secondary structures within the polynucleotide. Codon optimization tools, algorithms and services are known in the art; non-limiting examples include services from GeneArt (Life Technologies), DNA2.0 (Menlo Park, Calif.) and/or proprietary methods. In one embodiment, the mRNA sequence is optimized using optimization algorithms, e.g., to optimize expression in mammalian cells or enhance mRNA stability.

[0559] In certain embodiments, the present disclosure includes polynucleotides having at least 80%, at least 85%, at least 90%, at least 95%, at least 98%, or at least 99% sequence identity to any of the polynucleotide sequences described herein.

[0560] mRNAs of the present disclosure may be produced by means available in the art, including but not limited to in vitro transcription (IVT) and synthetic methods. Enzymatic (IVT), solid-phase, liquid-phase, combined synthetic methods, small region synthesis, and ligation methods may be utilized. In one embodiment, mRNAs are made using IVT enzymatic synthesis methods. Methods of making polynucleotides by IVT are known in the art and are described in International Application PCT/US2013/30062, the contents of which are incorporated herein by reference in their entirety. Accordingly, the present disclosure also includes polynucleotides, e.g., DNA, constructs (e.g., plasmids) and vectors (e.g., viral vectors) that may be used to in vitro transcribe an mRNA described herein.

[0561] Non-natural modified nucleobases may be introduced into polynucleotides, e.g., mRNA, during synthesis or post-synthesis. In certain embodiments, modifications may be on internucleoside linkages, purine or pyrimidine bases, or sugar. In particular embodiments, the modification may be introduced at the terminal of a polynucleotide chain or anywhere else in the polynucleotide chain; with chemical synthesis or with a polymerase enzyme. Examples of modified nucleic acids and their synthesis are disclosed in PCT application No. PCT/US2012/058519. Synthesis of modified polynucleotides is also described in Verma and Eckstein, Annual Review of Biochemistry, vol. 76, 99-134 (1998).

[0562] Either enzymatic or chemical ligation methods may be used to conjugate polynucleotides or their regions with different functional moieties, such as targeting or delivery agents, fluorescent labels, liquids, nanoparticles, etc. Conjugates of polynucleotides and modified polynucleotides are reviewed in Goodchild, Bioconjugate Chemistry, vol. 1(3), 165-187 (1990).

MicroRNA (miRNA) Binding Sites

[0563] Polynucleotides of the disclosure can include regulatory elements, for example, microRNA (miRNA) binding sites, transcription factor binding sites, structured mRNA sequences and/or motifs, artificial binding sites engineered to act as pseudo-receptors for endogenous nucleic acid binding molecules, and combinations thereof. In some embodiments, polynucleotides including such regulatory elements are referred to as including “sensor sequences.” Non-limiting examples of sensor sequences are described in U.S. Publication 2014/0200261, the contents of which are incorporated herein by reference in their entirety.

[0564] In some embodiments, a polynucleotide (e.g., a ribonucleic acid (RNA), e.g., a messenger RNA (mRNA)) of the disclosure comprises an open reading frame (ORF) encoding a polypeptide of interest and further comprises one or more miRNA binding site(s). Inclusion or incorporation of miRNA binding site(s) provides for regulation of polynucleotides of the disclosure, and in turn, of the polypeptides encoded therefrom, based on tissue-specific and/or cell-type specific expression of naturally-occurring miRNAs.

[0565] A miRNA, e.g., a natural-occurring miRNA, is a 19-25 nucleotide long noncoding RNA that binds to a polynucleotide and down-regulates gene expression either by reducing stability or by inhibiting translation of the polynucleotide. A miRNA sequence comprises a “seed” region, i.e., a sequence in the region of positions 2-8 of the mature miRNA. A miRNA seed can comprise positions 2-8 or 2-7 of the mature miRNA. In some embodiments, a miRNA seed can comprise 7 nucleotides (e.g., nucleotides 2-8 of the mature miRNA), wherein the seed-complementary site in the corresponding miRNA binding site is flanked by an adenosine (A) opposed to miRNA position 1. In some embodiments, a miRNA seed can comprise 6 nucleotides (e.g., nucleotides 2-7 of the mature miRNA), wherein the seed-complementary site in the corresponding miRNA binding site is flanked by an adenosine (A) opposed to miRNA position 1. See, for example, Grimson A, Farh K K, Johnston W K, Garrett-Engele P, Lim L P, Bartel D P; Mol Cell. 2007 Jul. 6; 27(1):91-105. miRNA profiling of the target cells or tissues can be conducted to determine the presence or absence of miRNA in the cells or tissues. In some embodiments, a polynucleotide (e.g., a ribonucleic acid (RNA), e.g., a messenger RNA (mRNA)) of the disclosure comprises one or more microRNA binding sites, microRNA target sequences, microRNA complementary sequences, or microRNA seed complementary sequences. Such sequences can correspond to, e.g., have complementarity to, any known microRNA such as those taught in US Publication US2005/0261218 and US Publication US2005/0059005, the contents of each of which are incorporated herein by reference in their entirety.

[0566] As used herein, the term “microRNA (miRNA or miR) binding site” refers to a sequence within a polynucleotide, e.g., within a DNA or within an RNA transcript, including in the 5′UTR and/or 3′UTR, that has sufficient complementarity to all or a region of a miRNA to interact with, associate with or bind to the miRNA. In some embodiments, a polynucleotide of the disclosure comprising an ORF encoding a polypeptide of interest and further comprises one or more miRNA binding site(s). In exemplary embodiments, a 5′UTR and/or 3′UTR of the polynucleotide (e.g., a ribonucleic acid (RNA), e.g., a messenger RNA (mRNA)) comprises the one or more miRNA binding site(s).

[0567] A miRNA binding site having sufficient complementarity to a miRNA refers to a degree of complementarity sufficient to facilitate miRNA-mediated regulation of a polynucleotide, e.g., miRNA-mediated translational repression or degradation of the polynucleotide. In exemplary aspects of the disclosure, a miRNA binding site having sufficient complementarity to the miRNA refers to a degree of complementarity sufficient to facilitate miRNA-mediated degradation of the polynucleotide, e.g., miRNA-guided RNA-induced silencing complex (RISC)-mediated cleavage of mRNA. The miRNA binding site can have complementarity to, for example, a 19-25 nucleotide miRNA sequence, to a 19-23 nucleotide miRNA sequence, or to a 22 nucleotide miRNA sequence. A miRNA binding site can be complementary to only a portion of a miRNA, e.g., to a portion less than 1, 2, 3, or 4 nucleotides of the full length of a naturally-occurring miRNA sequence. Full or complete complementarity (e.g., full complementarity or complete complementarity over all or a significant portion of the length of a naturally-occurring miRNA) is preferred when the desired regulation is mRNA degradation.

[0568] In some embodiments, a miRNA binding site includes a sequence that has complementarity (e.g., partial or complete complementarity) with a miRNA seed sequence. In some embodiments, the miRNA binding site includes a sequence that has complete complementarity with a miRNA seed sequence. In some embodiments, a miRNA binding site includes a sequence that has complementarity (e.g., partial or complete complementarity) with an miRNA sequence. In some embodiments, the miRNA binding site includes a sequence that has complete complementarity with a miRNA sequence. In some embodiments, a miRNA binding site has complete complementarity with a miRNA sequence but for 1, 2, or 3 nucleotide substitutions, terminal additions, and/or truncations.

[0569] In some embodiments, the miRNA binding site is the same length as the corresponding miRNA. In other embodiments, the miRNA binding site is one, two, three, four, five, six, seven, eight, nine, ten, eleven or twelve nucleotide(s) shorter than the corresponding miRNA at the 5′ terminus, the 3′ terminus, or both. In still other embodiments, the microRNA binding site is two nucleotides shorter than the corresponding microRNA at the 5′ terminus, the 3′ terminus, or both. The miRNA binding sites that are shorter than the corresponding miRNAs are still capable of degrading the mRNA incorporating one or more of the miRNA binding sites or preventing the mRNA from translation.

[0570] In some embodiments, the miRNA binding site binds the corresponding mature miRNA that is part of an active RISC containing Dicer. In another embodiment, binding of the miRNA binding site to the corresponding miRNA in RISC degrades the mRNA containing the miRNA binding site or prevents the mRNA from being translated. In some embodiments, the miRNA binding site has sufficient complementarity to miRNA so that a RISC complex comprising the miRNA cleaves the polynucleotide comprising the miRNA binding site. In other embodiments, the miRNA binding site has imperfect complementarity so that a RISC complex comprising the miRNA induces instability in the polynucleotide comprising the miRNA binding site. In another embodiment, the miRNA binding site has imperfect complementarity so that a RISC complex comprising the miRNA represses transcription of the polynucleotide comprising the miRNA binding site.

[0571] In some embodiments, the miRNA binding site has one, two, three, four, five, six, seven, eight, nine, ten, eleven or twelve mismatch(es) from the corresponding miRNA.

[0572] In some embodiments, the miRNA binding site has at least about ten, at least about eleven, at least about twelve, at least about thirteen, at least about fourteen, at least about fifteen, at least about sixteen, at least about seventeen, at least about eighteen, at least about nineteen, at least about twenty, or at least about twenty-one contiguous nucleotides complementary to at least about ten, at least about eleven, at least about twelve, at least about thirteen, at least about fourteen, at least about fifteen, at least about sixteen, at least about seventeen, at least about eighteen, at least about nineteen, at least about twenty, or at least about twenty-one, respectively, contiguous nucleotides of the corresponding miRNA.

[0573] By engineering one or more miRNA binding sites into a polynucleotide of the disclosure, the polynucleotide can be targeted for degradation or reduced translation, provided the miRNA in question is available. This can reduce off-target effects upon delivery of the polynucleotide. For example, if a polynucleotide of the disclosure is not intended to be delivered to a tissue or cell but ends up is said tissue or cell, then a miRNA abundant in the tissue or cell can inhibit the expression of the gene of interest if one or multiple binding sites of the miRNA are engineered into the 5′UTR and/or 3′UTR of the polynucleotide.

[0574] Conversely, miRNA binding sites can be removed from polynucleotide sequences in which they naturally occur in order to increase protein expression in specific tissues. For example, a binding site for a specific miRNA can be removed from a polynucleotide to improve protein expression in tissues or cells containing the miRNA.

[0575] In one embodiment, a polynucleotide of the disclosure can include at least one miRNA-binding site in the 5′UTR and/or 3′UTR in order to regulate cytotoxic or cytoprotective mRNA therapeutics to specific cells such as, but not limited to, normal and/or cancerous cells. In another embodiment, a polynucleotide of the disclosure can include two, three, four, five, six, seven, eight, nine, ten, or more miRNA-binding sites in the 5′-UTR and/or 3′-UTR in order to regulate cytotoxic or cytoprotective mRNA therapeutics to specific cells such as, but not limited to, normal and/or cancerous cells.

[0576] Regulation of expression in multiple tissues can be accomplished through introduction or removal of one or more miRNA binding sites, e.g., one or more distinct miRNA binding sites. The decision whether to remove or insert a miRNA binding site can be made based on miRNA expression patterns and/or their profilings in tissues and/or cells in development and/or disease. Identification of miRNAs, miRNA binding sites, and their expression patterns and role in biology have been reported (e.g., Bonauer et al., Curr Drug Targets 2010 11:943-949; Anand and Cheresh Curr Opin Hematol 2011 18:171-176; Contreras and Rao Leukemia 2012 26:404-413 (2011 Dec. 20. doi: 10.1038/leu.2011.356); Bartel Cell 2009 136:215-233; Landgraf et al, Cell, 2007 129:1401-1414; Gentner and Naldini, Tissue Antigens. 2012 80:393-403 and all references therein; each of which is incorporated herein by reference in its entirety).

[0577] miRNAs and miRNA binding sites can correspond to any known sequence, including non-limiting examples described in U.S. Publication Nos. 2014/0200261, 2005/0261218, and 2005/0059005, each of which are incorporated herein by reference in their entirety.

[0578] Examples of tissues where miRNA are known to regulate mRNA, and thereby protein expression, include, but are not limited to, liver (miR-122), muscle (miR-133, miR-206, miR-208), endothelial cells (miR-17-92, miR-126), myeloid cells (miR-142-3p, miR-142-5p, miR-16, miR-21, miR-223, miR-24, miR-27), adipose tissue (let-7, miR-30c), heart (miR-1d, miR-149), kidney (miR-192, miR-194, miR-204), and lung epithelial cells (let-7, miR-133, miR-126).

[0579] Specifically, miRNAs are known to be differentially expressed in immune cells (also called hematopoietic cells), such as antigen presenting cells (APCs) (e.g., dendritic cells and macrophages), macrophages, monocytes, B lymphocytes, T lymphocytes, granulocytes, natural killer cells, etc. Immune cell specific miRNAs are involved in immunogenicity, autoimmunity, the immune response to infection, inflammation, as well as unwanted immune response after gene therapy and tissue/organ transplantation. Immune cell specific miRNAs also regulate many aspects of development, proliferation, differentiation and apoptosis of hematopoietic cells (immune cells). For example, miR-142 and miR-146 are exclusively expressed in immune cells, particularly abundant in myeloid dendritic cells. It has been demonstrated that the immune response to a polynucleotide can be shut-off by adding miR-142 binding sites to the 3′-UTR of the polynucleotide, enabling more stable gene transfer in tissues and cells. miR-142 efficiently degrades exogenous polynucleotides in antigen presenting cells and suppresses cytotoxic elimination of transduced cells (e.g., Annoni A et al., blood, 2009, 114, 5152-5161; Brown B D, et al., Nat med. 2006, 12(5), 585-591; Brown B D, et al., blood, 2007, 110(13): 4144-4152, each of which is incorporated herein by reference in its entirety).

[0580] An antigen-mediated immune response can refer to an immune response triggered by foreign antigens, which, when entering an organism, are processed by the antigen presenting cells and displayed on the surface of the antigen presenting cells. T cells can recognize the presented antigen and induce a cytotoxic elimination of cells that express the antigen.

[0581] Introducing a miR-142 binding site into the 5′UTR and/or 3′UTR of a polynucleotide of the disclosure can selectively repress gene expression in antigen presenting cells through miR-142 mediated degradation, limiting antigen presentation in antigen presenting cells (e.g., dendritic cells) and thereby preventing antigen-mediated immune response after the delivery of the polynucleotide. The polynucleotide is then stably expressed in target tissues or cells without triggering cytotoxic elimination.

[0582] In one embodiment, binding sites for miRNAs that are known to be expressed in immune cells, in particular, antigen presenting cells, can be engineered into a polynucleotide of the disclosure to suppress the expression of the polynucleotide in antigen presenting cells through miRNA mediated RNA degradation, subduing the antigen-mediated immune response. Expression of the polynucleotide is maintained in non-immune cells where the immune cell specific miRNAs are not expressed. For example, in some embodiments, to prevent an immunogenic reaction against a liver specific protein, any miR-122 binding site can be removed and a miR-142 (and/or mirR-146) binding site can be engineered into the 5′UTR and/or 3′UTR of a polynucleotide of the disclosure.

[0583] To further drive the selective degradation and suppression in APCs and macrophage, a polynucleotide of the disclosure can include a further negative regulatory element in the 5′UTR and/or 3′UTR, either alone or in combination with miR-142 and/or miR-146 binding sites. As a non-limiting example, the further negative regulatory element is a Constitutive Decay Element (CDE).

[0584] Immune cell specific miRNAs include, but are not limited to, hsa-let-7a-2-3p, hsa-let-7a-3p, hsa-7a-5p, hsa-let-7c, hsa-let-7e-3p, hsa-let-7e-5p, hsa-let-7g-3p, hsa-let-7g-5p, hsa-let-7i-3p, hsa-let-7i-5p, miR-10a-3p, miR-10a-5p, miR-184, hsa-let-7f-1-3p, hsa-let-7f-2-5p, hsa-let-7f-5p, miR-125b-1-3p, miR-125b-2-3p, miR-125b-5p, miR-1279, miR-130a-3p, miR-130a-5p, miR-132-3p, miR-132-5p, miR-142-3p, miR-142-5p, miR-143-3p, miR-143-5p, miR-146a-3p, miR-146a-5p, miR-146b-3p, miR-146b-5p, miR-147a, miR-147b, miR-148a-5p, miR-148a-3p, miR-150-3p, miR-150-5p, miR-151b, miR-155-3p, miR-155-5p, miR-15a-3p, miR-15a-5p, miR-15b-5p, miR-15b-3p, miR-16-1-3p, miR-16-2-3p, miR-16-5p, miR-17-5p, miR-181a-3p, miR-181a-5p, miR-181a-2-3p, miR-182-3p, miR-182-5p, miR-197-3p, miR-197-5p, miR-21-5p, miR-21-3p, miR-214-3p, miR-214-5p, miR-223-3p, miR-223-5p, miR-221-3p, miR-221-5p, miR-23b-3p, miR-23b-5p, miR-24-1-5p, miR-24-2-5p, miR-24-3p, miR-26a-1-3p, miR-26a-2-3p, miR-26a-5p, miR-26b-3p, miR-26b-5p, miR-27a-3p, miR-27a-5p, miR-27b-3p, miR-27b-5p, miR-28-3p, miR-28-5p, miR-2909, miR-29a-3p, miR-29a-5p, miR-29b-1-5p, miR-29b-2-5p, miR-29c-3p, miR-29c-5p, miR-30e-3p, miR-30e-5p, miR-331-5p, miR-339-3p, miR-339-5p, miR-345-3p, miR-345-5p, miR-346, miR-34a-3p, miR-34a-5p, miR-363-3p, miR-363-5p, miR-372, miR-377-3p, miR-377-5p, miR-493-3p, miR-493-5p, miR-542, miR-548b-5p, miR548c-5p, miR-548i, miR-548j, miR-548n, miR-574-3p, miR-598, miR-718, miR-935, miR-99a-3p, miR-99a-5p, miR-99b-3p, and miR-99b-5p. Furthermore, novel miRNAs can be identified in immune cell through micro-array hybridization and microtome analysis (e.g., Jima D D et al, Blood, 2010, 116:e118-e127; Vaz C et al., BMC Genomics, 2010, 11,288, the content of each of which is incorporated herein by reference in its entirety.)

[0585] miRNAs that are known to be expressed in the liver include, but are not limited to, miR-107, miR-122-3p, miR-122-5p, miR-1228-3p, miR-1228-5p, miR-1249, miR-129-5p, miR-1303, miR-151a-3p, miR-151a-5p, miR-152, miR-194-3p, miR-194-5p, miR-199a-3p, miR-199a-5p, miR-199b-3p, miR-199b-5p, miR-296-5p, miR-557, miR-581, miR-939-3p, and miR-939-5p. miRNA binding sites from any liver specific miRNA can be introduced to or removed from a polynucleotide of the disclosure to regulate expression of the polynucleotide in the liver. Liver specific miRNA binding sites can be engineered alone or further in combination with immune cell (e.g., APC) miRNA binding sites in a polynucleotide of the disclosure.

[0586] miRNAs that are known to be expressed in the lung include, but are not limited to, let-7a-2-3p, let-7a-3p, let-7a-5p, miR-126-3p, miR-126-5p, miR-127-3p, miR-127-5p, miR-130a-3p, miR-130a-5p, miR-130b-3p, miR-130b-5p, miR-133a, miR-133b, miR-134, miR-18a-3p, miR-18a-5p, miR-18b-3p, miR-18b-5p, miR-24-1-5p, miR-24-2-5p, miR-24-3p, miR-296-3p, miR-296-5p, miR-32-3p, miR-337-3p, miR-337-5p, miR-381-3p, and miR-381-5p. miRNA binding sites from any lung specific miRNA can be introduced to or removed from a polynucleotide of the disclosure to regulate expression of the polynucleotide in the lung. Lung specific miRNA binding sites can be engineered alone or further in combination with immune cell (e.g., APC) miRNA binding sites in a polynucleotide of the disclosure.

[0587] miRNAs that are known to be expressed in the heart include, but are not limited to, miR-1, miR-133a, miR-133b, miR-149-3p, miR-149-5p, miR-186-3p, miR-186-5p, miR-208a, miR-208b, miR-210, miR-296-3p, miR-320, miR-451a, miR-451b, miR-499a-3p, miR-499a-5p, miR-499b-3p, miR-499b-5p, miR-744-3p, miR-744-5p, miR-92b-3p, and miR-92b-5p. miRNA binding sites from any heart specific microRNA can be introduced to or removed from a polynucleotide of the disclosure to regulate expression of the polynucleotide in the heart. Heart specific miRNA binding sites can be engineered alone or further in combination with immune cell (e.g., APC) miRNA binding sites in a polynucleotide of the disclosure.

[0588] miRNAs that are known to be expressed in the nervous system include, but are not limited to, miR-124-5p, miR-125a-3p, miR-125a-5p, miR-125b-1-3p, miR-125b-2-3p, miR-125b-5p, miR-1271-3p, miR-1271-5p, miR-128, miR-132-5p, miR-135a-3p, miR-135a-5p, miR-135b-3p, miR-135b-5p, miR-137, miR-139-5p, miR-139-3p, miR-149-3p, miR-149-5p, miR-153, miR-181c-3p, miR-181c-5p, miR-183-3p, miR-183-5p, miR-190a, miR-190b, miR-212-3p, miR-212-5p, miR-219-1-3p, miR-219-2-3p, miR-23a-3p, miR-23a-5p, miR-30a-5p, miR-30b-3p, miR-30b-5p, miR-30c-1-3p, miR-30c-2-3p, miR-30c-5p, miR-30d-3p, miR-30d-5p, miR-329, miR-342-3p, miR-3665, miR-3666, miR-380-3p, miR-380-5p, miR-383, miR-410, miR-425-3p, miR-425-5p, miR-454-3p, miR-454-5p, miR-483, miR-510, miR-516a-3p, miR-548b-5p, miR-548c-5p, miR-571, miR-7-1-3p, miR-7-2-3p, miR-7-5p, miR-802, miR-922, miR-9-3p, and miR-9-5p. miRNAs enriched in the nervous system further include those specifically expressed in neurons, including, but not limited to, miR-132-3p, miR-132-3p, miR-148b-3p, miR-148b-5p, miR-151a-3p, miR-151a-5p, miR-212-3p, miR-212-5p, miR-320b, miR-320e, miR-323a-3p, miR-323a-5p, miR-324-5p, miR-325, miR-326, miR-328, miR-922 and those specifically expressed in glial cells, including, but not limited to, miR-1250, miR-219-1-3p, miR-219-2-3p, miR-219-5p, miR-23a-3p, miR-23a-5p, miR-3065-3p, miR-3065-5p, miR-30e-3p, miR-30e-5p, miR-32-5p, miR-338-5p, and miR-657. miRNA binding sites from any CNS specific miRNA can be introduced to or removed from a polynucleotide of the disclosure to regulate expression of the polynucleotide in the nervous system. Nervous system specific miRNA binding sites can be engineered alone or further in combination with immune cell (e.g., APC) miRNA binding sites in a polynucleotide of the disclosure.

[0589] miRNAs that are known to be expressed in the pancreas include, but are not limited to, miR-105-3p, miR-105-5p, miR-184, miR-195-3p, miR-195-5p, miR-196a-3p, miR-196a-5p, miR-214-3p, miR-214-5p, miR-216a-3p, miR-216a-5p, miR-30a-3p, miR-33a-3p, miR-33a-5p, miR-375, miR-7-1-3p, miR-7-2-3p, miR-493-3p, miR-493-5p, and miR-944. miRNA binding sites from any pancreas specific miRNA can be introduced to or removed from a polynucleotide of the disclosure to regulate expression of the polynucleotide in the pancreas. Pancreas specific miRNA binding sites can be engineered alone or further in combination with immune cell (e.g. APC) miRNA binding sites in a polynucleotide of the disclosure.

[0590] miRNAs that are known to be expressed in the kidney include, but are not limited to, miR-122-3p, miR-145-5p, miR-17-5p, miR-192-3p, miR-192-5p, miR-194-3p, miR-194-5p, miR-20a-3p, miR-20a-5p, miR-204-3p, miR-204-5p, miR-210, miR-216a-3p, miR-216a-5p, miR-296-3p, miR-30a-3p, miR-30a-5p, miR-30b-3p, miR-30b-5p, miR-30c-1-3p, miR-30c-2-3p, miR30c-5p, miR-324-3p, miR-335-3p, miR-335-5p, miR-363-3p, miR-363-5p, and miR-562. miRNA binding sites from any kidney specific miRNA can be introduced to or removed from a polynucleotide of the disclosure to regulate expression of the polynucleotide in the kidney. Kidney specific miRNA binding sites can be engineered alone or further in combination with immune cell (e.g., APC) miRNA binding sites in a polynucleotide of the disclosure.

[0591] miRNAs that are known to be expressed in the muscle include, but are not limited to, let-7g-3p, let-7g-5p, miR-1, miR-1286, miR-133a, miR-133b, miR-140-3p, miR-143-3p, miR-143-5p, miR-145-3p, miR-145-5p, miR-188-3p, miR-188-5p, miR-206, miR-208a, miR-208b, miR-25-3p, and miR-25-5p. miRNA binding sites from any muscle specific miRNA can be introduced to or removed from a polynucleotide of the disclosure to regulate expression of the polynucleotide in the muscle. Muscle specific miRNA binding sites can be engineered alone or further in combination with immune cell (e.g., APC) miRNA binding sites in a polynucleotide of the disclosure.

[0592] miRNAs are also differentially expressed in different types of cells, such as, but not limited to, endothelial cells, epithelial cells, and adipocytes.

[0593] miRNAs that are known to be expressed in endothelial cells include, but are not limited to, let-7b-3p, let-7b-5p, miR-100-3p, miR-100-5p, miR-101-3p, miR-101-5p, miR-126-3p, miR-126-5p, miR-1236-3p, miR-1236-5p, miR-130a-3p, miR-130a-5p, miR-17-5p, miR-17-3p, miR-18a-3p, miR-18a-5p, miR-19a-3p, miR-19a-5p, miR-19b-1-5p, miR-19b-2-5p, miR-19b-3p, miR-20a-3p, miR-20a-5p, miR-217, miR-210, miR-21-3p, miR-21-5p, miR-221-3p, miR-221-5p, miR-222-3p, miR-222-5p, miR-23a-3p, miR-23a-5p, miR-296-5p, miR-361-3p, miR-361-5p, miR-421, miR-424-3p, miR-424-5p, miR-513a-5p, miR-92a-1-5p, miR-92a-2-5p, miR-92a-3p, miR-92b-3p, and miR-92b-5p. Many novel miRNAs are discovered in endothelial cells from deep-sequencing analysis (e.g., Voellenkle C et al., RNA, 2012, 18, 472-484, herein incorporated by reference in its entirety). miRNA binding sites from any endothelial cell specific miRNA can be introduced to or removed from a polynucleotide of the disclosure to regulate expression of the polynucleotide in the endothelial cells.

[0594] miRNAs that are known to be expressed in epithelial cells include, but are not limited to, let-7b-3p, let-7b-5p, miR-1246, miR-200a-3p, miR-200a-5p, miR-200b-3p, miR-200b-5p, miR-200c-3p, miR-200c-5p, miR-338-3p, miR-429, miR-451a, miR-451b, miR-494, miR-802 and miR-34a, miR-34b-5p, miR-34c-5p, miR-449a, miR-449b-3p, miR-449b-5p specific in respiratory ciliated epithelial cells, let-7 family, miR-133a, miR-133b, miR-126 specific in lung epithelial cells, miR-382-3p, miR-382-5p specific in renal epithelial cells, and miR-762 specific in corneal epithelial cells. miRNA binding sites from any epithelial cell specific miRNA can be introduced to or removed from a polynucleotide of the disclosure to regulate expression of the polynucleotide in the epithelial cells.

[0595] In addition, a large group of miRNAs are enriched in embryonic stem cells, controlling stem cell self-renewal as well as the development and/or differentiation of various cell lineages, such as neural cells, cardiac, hematopoietic cells, skin cells, osteogenic cells and muscle cells (e.g., Kuppusamy K T et al., Curr. Mol Med, 2013, 13(5), 757-764; Vidigal J A and Ventura A, Semin Cancer Biol. 2012, 22(5-6), 428-436; GoffLA et al., PLoS One, 2009, 4:e7192; Morin R D et al., Genome Res, 2008, 18, 610-621; Yoo J K et al., Stem Cells Dev. 2012, 21(11), 2049-2057, each of which is herein incorporated by reference in its entirety). miRNAs abundant in embryonic stem cells include, but are not limited to, let-7a-2-3p, let-a-3p, let-7a-5p, let7d-3p, let-7d-5p, miR-103a-2-3p, miR-103a-5p, miR-106b-3p, miR-106b-5p, miR-1246, miR-1275, miR-138-1-3p, miR-138-2-3p, miR-138-5p, miR-154-3p, miR-154-5p, miR-200c-3p, miR-200c-5p, miR-290, miR-301a-3p, miR-301a-5p, miR-302a-3p, miR-302a-5p, miR-302b-3p, miR-302b-5p, miR-302c-3p, miR-302c-5p, miR-302d-3p, miR-302d-5p, miR-302e, miR-367-3p, miR-367-5p, miR-369-3p, miR-369-5p, miR-370, miR-371, miR-373, miR-380-5p, miR-423-3p, miR-423-5p, miR-486-5p, miR-520c-3p, miR-548e, miR-548f, miR-548g-3p, miR-548g-5p, miR-548i, miR-548k, miR-548l, miR-548m, miR-548n, miR-548o-3p, miR-548o-5p, miR-548p, miR-664a-3p, miR-664a-5p, miR-664b-3p, miR-664b-5p, miR-766-3p, miR-766-5p, miR-885-3p, miR-885-5p, miR-93-3p, miR-93-5p, miR-941, miR-96-3p, miR-96-5p, miR-99b-3p and miR-99b-5p. Many predicted novel miRNAs are discovered by deep sequencing in human embryonic stem cells (e.g., Morin R D et al., Genome Res, 2008, 18, 610-621; Goff L A et al., PLoS One, 2009, 4:e7192; Bar M et al., Stem cells, 2008, 26, 2496-2505, the content of each of which is incorporated herein by reference in its entirety).

[0596] In one embodiment, the binding sites of embryonic stem cell specific miRNAs can be included in or removed from the 3′UTR of a polynucleotide of the disclosure to modulate the development and/or differentiation of embryonic stem cells, to inhibit the senescence of stem cells in a degenerative condition (e.g. degenerative diseases), or to stimulate the senescence and apoptosis of stem cells in a disease condition (e.g. cancer stem cells).

[0597] Many miRNA expression studies are conducted to profile the differential expression of miRNAs in various cancer cells/tissues and other diseases. Some miRNAs are abnormally over-expressed in certain cancer cells and others are under-expressed. For example, miRNAs are differentially expressed in cancer cells (WO2008/154098, US2013/0059015, US2013/0042333, WO2011/157294); cancer stem cells (US2012/0053224); pancreatic cancers and diseases (US2009/0131348, US2011/0171646, US2010/0286232, U.S. Pat. No. 8,389,210); asthma and inflammation (U.S. Pat. No. 8,415,096); prostate cancer (US2013/0053264); hepatocellular carcinoma (WO2012/151212, US2012/0329672, WO2008/054828, U.S. Pat. No. 8,252,538); lung cancer cells (WO2011/076143, WO2013/033640, WO2009/070653, US2010/0323357); cutaneous T cell lymphoma (WO2013/011378); colorectal cancer cells (WO2011/0281756, WO2011/076142); cancer positive lymph nodes (WO2009/100430, US2009/0263803); nasopharyngeal carcinoma (EP2112235); chronic obstructive pulmonary disease (US2012/0264626, US2013/0053263); thyroid cancer (WO2013/066678); ovarian cancer cells (US2012/0309645, WO2011/095623); breast cancer cells (WO2008/154098, WO2007/081740, US2012/0214699), leukemia and lymphoma (WO2008/073915, US2009/0092974, US2012/0316081, US2012/0283310, WO2010/018563), the content of each of which is incorporated herein by reference in its entirety.

[0598] As a non-limiting example, miRNA binding sites for miRNAs that are over-expressed in certain cancer and/or tumor cells can be removed from the 3′UTR of a polynucleotide of the disclosure, restoring the expression suppressed by the over-expressed miRNAs in cancer cells, thus ameliorating the corresponsive biological function, for instance, transcription stimulation and/or repression, cell cycle arrest, apoptosis and cell death. Normal cells and tissues, wherein miRNAs expression is not up-regulated, will remain unaffected.

[0599] miRNA can also regulate complex biological processes such as angiogenesis (e.g., miR-132) (Anand and Cheresh Curr Opin Hematol 2011 18:171-176). In the polynucleotides of the disclosure, miRNA binding sites that are involved in such processes can be removed or introduced, in order to tailor the expression of the polynucleotides to biologically relevant cell types or relevant biological processes. In this context, the polynucleotides of the disclosure are defined as auxotrophic polynucleotides.

[0600] In some embodiments, the therapeutic window and/or differential expression (e.g., tissue-specific expression) of a polypeptide of the disclosure may be altered by incorporation of a miRNA binding site into an mRNA encoding the polypeptide. In one example, an mRNA may include one or more miRNA binding sites that are bound by miRNAs that have higher expression in one tissue type as compared to another. In another example, an mRNA may include one or more miRNA binding sites that are bound by miRNAs that have lower expression in a cancer cell as compared to a non-cancerous cell of the same tissue of origin. When present in a cancer cell that expresses low levels of such an miRNA, the polypeptide encoded by the mRNA typically will show increased expression.

[0601] Liver cancer cells (e.g., hepatocellular carcinoma cells) typically express low levels of miR-122 as compared to normal liver cells. Therefore, an mRNA encoding a polypeptide that includes at least one miR-122 binding site (e.g., in the 3′-UTR of the mRNA) will typically express comparatively low levels of the polypeptide in normal liver cells and comparatively high levels of the polypeptide in liver cancer cells. If the polypeptide is able to induce immunogenic cell death, this can cause preferential immunogenic cell killing of liver cancer cells (e.g., hepatocellular carcinoma cells) as compared to normal liver cells.

[0602] In some embodiments, the mRNA includes at least one miR-122 binding site, at least two miR-122 binding sites, at least three miR-122 binding sites, at least four miR-122 binding sites, or at least five miR-122 binding sites. In one aspect, the miRNA binding site binds miR-122 or is complementary to miR-122. In another aspect, the miRNA binding site binds to miR-122-3p or miR-122-5p. In a particular aspect, the miRNA binding site comprises a nucleotide sequence at least 80%, at least 85%, at least 90%, at least 95%, or 100% identical to SEQ ID NO: 1326, wherein the miRNA binding site binds to miR-122. In another particular aspect, the miRNA binding site comprises a nucleotide sequence at least 80%, at least 85%, at least 90%, at least 95%, or 100% identical to SEQ ID NO: 26, wherein the miRNA binding site binds to miR-122. These sequences are shown below in Table 3.

[0603] In some embodiments, a polynucleotide of the disclosure comprises a miRNA binding site, wherein the miRNA binding site comprises one or more nucleotide sequences selected from Table 3, including one or more copies of any one or more of the miRNA binding site sequences. In some embodiments, a polynucleotide of the disclosure further comprises at least one, two, three, four, five, six, seven, eight, nine, ten, or more of the same or different miRNA binding sites selected from Table 3, including any combination thereof. In some embodiments, the miRNA binding site binds to miR-142 or is complementary to miR-142. In some embodiments, the miR-142 comprises SEQ ID NO: 27. In some embodiments, the miRNA binding site binds to miR-142-3p or miR-142-5p. In some embodiments, the miR-142-3p binding site comprises SEQ ID NO: 29. In some embodiments, the miR-142-5p binding site comprises SEQ ID NO: 31. In some embodiments, the miRNA binding site comprises a nucleotide sequence at least 80%, at least 85%, at least 90%, at least 95%, or 100% identical to SEQ ID NO: 29 or SEQ ID NO: 31.

TABLE 3
Representative microRNAs and microRNA binding
sites

| SEQ | | |
|---|---|---|
| ID | | |
| NO. | Description | Sequence |
| 27 | miR-142 | GACAGUGCAGUCACCCAUAAAGUAGAAAGCAC |
| | | UACUAACAGCACUGGAGGGUGUAGUGUUUCCU |
| | | ACUUUAUGGAUGAGUGUACUGUG |
| 28 | miR-142-3p | UGUAGUGUUUCCUACUUUAUGGA |
| 29 | miR-142-3p | UCCAUAAAGUAGGAAACACUACA |
| | binding site | |
| 30 | miR-142-5p | CAUAAAGUAGAAAGCACUACU |
| 31 | miR-142-5p | AGUAGUGCUUUCUACUUUAUG |
| | binding site | |
| 1324 | miR-122 | CCUUAGCAGAGCUGUGGAGUGUGACAAUGGUG |
| | | UUUGUGUCUAAACUAUCAAACGCCAUUAUCAC |
| | | ACUAAAUAGCUACUGCUAGGC |
| 32 | miR-122-3p | AACGCCAUUAUCACACUAAAUA |
| 1325 | miR-122-3p | UAUUUAGUGUGAUAAUGGCGUU |
| | binding site | |
| 33 | miR-122-5p | UGGAGUGUGACAAUGGUGUUUG |
| 1326 | miR-122-5p | CAAACACCAUUGUCACACUCCA |
| | binding site | |

[0604] In some embodiments, a miRNA binding site is inserted in the polynucleotide of the disclosure in any position of the polynucleotide (e.g., the 5′UTR and/or 3′UTR). In some embodiments, the 5′UTR comprises a miRNA binding site. In some embodiments, the 3′UTR comprises a miRNA binding site. In some embodiments, the 5′UTR and the 3′UTR comprise a miRNA binding site. The insertion site in the polynucleotide can be anywhere in the polynucleotide as long as the insertion of the miRNA binding site in the polynucleotide does not interfere with the translation of a functional polypeptide in the absence of the corresponding miRNA; and in the presence of the miRNA, the insertion of the miRNA binding site in the polynucleotide and the binding of the miRNA binding site to the corresponding miRNA are capable of degrading the polynucleotide or preventing the translation of the polynucleotide.

[0605] In some embodiments, a miRNA binding site is inserted in at least about 30 nucleotides downstream from the stop codon of an ORF in a polynucleotide of the disclosure comprising the ORF. In some embodiments, a miRNA binding site is inserted in at least about 10 nucleotides, at least about 15 nucleotides, at least about 20 nucleotides, at least about 25 nucleotides, at least about 30 nucleotides, at least about 35 nucleotides, at least about 40 nucleotides, at least about 45 nucleotides, at least about 50 nucleotides, at least about 55 nucleotides, at least about 60 nucleotides, at least about 65 nucleotides, at least about 70 nucleotides, at least about 75 nucleotides, at least about 80 nucleotides, at least about 85 nucleotides, at least about 90 nucleotides, at least about 95 nucleotides, or at least about 100 nucleotides downstream from the stop codon of an ORF in a polynucleotide of the disclosure. In some embodiments, a miRNA binding site is inserted in about 10 nucleotides to about 100 nucleotides, about 20 nucleotides to about 90 nucleotides, about 30 nucleotides to about 80 nucleotides, about 40 nucleotides to about 70 nucleotides, about 50 nucleotides to about 60 nucleotides, about 45 nucleotides to about 65 nucleotides downstream from the stop codon of an ORF in a polynucleotide of the disclosure.

[0606] miRNA gene regulation can be influenced by the sequence surrounding the miRNA such as, but not limited to, the species of the surrounding sequence, the type of sequence (e.g., heterologous, homologous, exogenous, endogenous, or artificial), regulatory elements in the surrounding sequence and/or structural elements in the surrounding sequence. The miRNA can be influenced by the 5′UTR and/or 3′UTR. As a non-limiting example, a non-human 3′UTR can increase the regulatory effect of the miRNA sequence on the expression of a polypeptide of interest compared to a human 3′UTR of the same sequence type.

[0607] In one embodiment, other regulatory elements and/or structural elements of the 5′UTR can influence miRNA mediated gene regulation. One example of a regulatory element and/or structural element is a structured IRES (Internal Ribosome Entry Site) in the 5′UTR, which is necessary for the binding of translational elongation factors to initiate protein translation. EIF4A2 binding to this secondarily structured element in the 5′-UTR is necessary for miRNA mediated gene expression (Meijer H A et al., Science, 2013, 340, 82-85, herein incorporated by reference in its entirety). The polynucleotides of the disclosure can further include this structured 5′UTR in order to enhance microRNA mediated gene regulation.

[0608] At least one miRNA binding site can be engineered into the 3′UTR of a polynucleotide of the disclosure. In this context, at least two, at least three, at least four, at least five, at least six, at least seven, at least eight, at least nine, at least ten, or more miRNA binding sites can be engineered into a 3′UTR of a polynucleotide of the disclosure. For example, 1 to 10, 1 to 9, 1 to 8, 1 to 7, 1 to 6, 1 to 5, 1 to 4, 1 to 3, 2, or 1 miRNA binding sites can be engineered into the 3′UTR of a polynucleotide of the disclosure. In one embodiment, miRNA binding sites incorporated into a polynucleotide of the disclosure can be the same or can be different miRNA sites. A combination of different miRNA binding sites incorporated into a polynucleotide of the disclosure can include combinations in which more than one copy of any of the different miRNA sites are incorporated. In another embodiment, miRNA binding sites incorporated into a polynucleotide of the disclosure can target the same or different tissues in the body. As a non-limiting example, through the introduction of tissue-, cell-type-, or disease-specific miRNA binding sites in the 3′-UTR of a polynucleotide of the disclosure, the degree of expression in specific cell types (e.g., hepatocytes, myeloid cells, endothelial cells, cancer cells, etc.) can be reduced.

[0609] In one embodiment, a miRNA binding site can be engineered near the 5′ terminus of the 3′UTR, about halfway between the 5′ terminus and 3′ terminus of the 3′UTR and/or near the 3′ terminus of the 3′UTR in a polynucleotide of the disclosure. As a non-limiting example, a miRNA binding site can be engineered near the 5′ terminus of the 3′UTR and about halfway between the 5′ terminus and 3′ terminus of the 3′UTR. As another non-limiting example, a miRNA binding site can be engineered near the 3′ terminus of the 3′UTR and about halfway between the 5′ terminus and 3′ terminus of the 3′UTR. As yet another non-limiting example, a miRNA binding site can be engineered near the 5′ terminus of the 3′UTR and near the 3′ terminus of the 3′UTR.

[0610] In another embodiment, a 3′UTR can comprise 1, 2, 3, 4, 5, 6, 7, 8, 9, or 10 miRNA binding sites. The miRNA binding sites can be complementary to a miRNA, miRNA seed sequence, and/or miRNA sequences flanking the seed sequence.

[0611] In one embodiment, a polynucleotide of the disclosure can be engineered to include more than one miRNA site expressed in different tissues or different cell types of a subject. As a non-limiting example, a polynucleotide of the disclosure can be engineered to include miR-192 and miR-122 to regulate expression of the polynucleotide in the liver and kidneys of a subject. In another embodiment, a polynucleotide of the disclosure can be engineered to include more than one miRNA site for the same tissue.

[0612] In some embodiments, the therapeutic window and or differential expression associated with the polypeptide encoded by a polynucleotide of the disclosure can be altered with a miRNA binding site. For example, a polynucleotide encoding a polypeptide that provides a death signal can be designed to be more highly expressed in cancer cells by virtue of the miRNA signature of those cells. Where a cancer cell expresses a lower level of a particular miRNA, the polynucleotide encoding the binding site for that miRNA (or miRNAs) would be more highly expressed. Hence, the polypeptide that provides a death signal triggers or induces cell death in the cancer cell. Neighboring noncancer cells, harboring a higher expression of the same miRNA would be less affected by the encoded death signal as the polynucleotide would be expressed at a lower level due to the effects of the miRNA binding to the binding site or “sensor” encoded in the 3′UTR. Conversely, cell survival or cytoprotective signals can be delivered to tissues containing cancer and non-cancerous cells where a miRNA has a higher expression in the cancer cells—the result being a lower survival signal to the cancer cell and a larger survival signal to the normal cell. Multiple polynucleotides can be designed and administered having different signals based on the use of miRNA binding sites as described herein.

[0613] In some embodiments, the expression of a polynucleotide of the disclosure can be controlled by incorporating at least one sensor sequence in the polynucleotide and formulating the polynucleotide for administration. As a non-limiting example, a polynucleotide of the disclosure can be targeted to a tissue or cell by incorporating a miRNA binding site and formulating the polynucleotide in a lipid nanoparticle comprising a cationic lipid, including any of the lipids described herein.

[0614] A polynucleotide of the disclosure can be engineered for more targeted expression in specific tissues, cell types, or biological conditions based on the expression patterns of miRNAs in the different tissues, cell types, or biological conditions. Through introduction of tissue-specific miRNA binding sites, a polynucleotide of the disclosure can be designed for optimal protein expression in a tissue or cell, or in the context of a biological condition.

[0615] In some embodiments, a polynucleotide of the disclosure can be designed to incorporate miRNA binding sites that either have 100% identity to known miRNA seed sequences or have less than 100% identity to miRNA seed sequences. In some embodiments, a polynucleotide of the disclosure can be designed to incorporate miRNA binding sites that have at least: 60%, 65%, 70%, 75%, 80%, 85%, 90%, 95%, 96%, 97%, 98%, or 99% identity to known miRNA seed sequences. The miRNA seed sequence can be partially mutated to decrease miRNA binding affinity and as such result in reduced downmodulation of the polynucleotide. In essence, the degree of match or mis-match between the miRNA binding site and the miRNA seed can act as a rheostat to more finely tune the ability of the miRNA to modulate protein expression. In addition, mutation in the non-seed region of a miRNA binding site can also impact the ability of a miRNA to modulate protein expression.

[0616] In one embodiment, a miRNA sequence can be incorporated into the loop of a stem loop.

[0617] In another embodiment, a miRNA seed sequence can be incorporated in the loop of a stem loop and a miRNA binding site can be incorporated into the 5′ or 3′ stem of the stem loop.

[0618] In one embodiment, a translation enhancer element (TEE) can be incorporated on the 5′end of the stem of a stem loop and a miRNA seed can be incorporated into the stem of the stem loop. In another embodiment, a TEE can be incorporated on the 5′ end of the stem of a stem loop, a miRNA seed can be incorporated into the stem of the stem loop and a miRNA binding site can be incorporated into the 3′ end of the stem or the sequence after the stem loop. The miRNA seed and the miRNA binding site can be for the same and/or different miRNA sequences.

[0619] In one embodiment, the incorporation of a miRNA sequence and/or a TEE sequence changes the shape of the stem loop region which can increase and/or decrease translation. (see e.g, Kedde et al., “A Pumilio-induced RNA structure switch in p27-3′UTR controls miR-221 and miR-22 accessibility.” Nature Cell Biology. 2010, incorporated herein by reference in its entirety).

[0620] In one embodiment, the 5′-UTR of a polynucleotide of the disclosure can comprise at least one miRNA sequence. The miRNA sequence can be, but is not limited to, a 19 or 22 nucleotide sequence and/or a miRNA sequence without the seed.

[0621] In one embodiment the miRNA sequence in the 5′UTR can be used to stabilize a polynucleotide of the disclosure described herein.

[0622] In another embodiment, a miRNA sequence in the 5′UTR of a polynucleotide of the disclosure can be used to decrease the accessibility of the site of translation initiation such as, but not limited to a start codon. See, e.g., Matsuda et al., PLoS One. 2010 11(5):e15057; incorporated herein by reference in its entirety, which used antisense locked nucleic acid (LNA) oligonucleotides and exon-junction complexes (EJCs) around a start codon (−4 to +37 where the A of the AUG codons is +1) in order to decrease the accessibility to the first start codon (AUG). Matsuda showed that altering the sequence around the start codon with an LNA or EJC affected the efficiency, length and structural stability of a polynucleotide. A polynucleotide of the disclosure can comprise a miRNA sequence, instead of the LNA or EJC sequence described by Matsuda et al, near the site of translation initiation in order to decrease the accessibility to the site of translation initiation. The site of translation initiation can be prior to, after or within the miRNA sequence. As a non-limiting example, the site of translation initiation can be located within a miRNA sequence such as a seed sequence or binding site. As another non-limiting example, the site of translation initiation can be located within a miR-122 sequence such as the seed sequence or the mir-122 binding site.

[0623] In some embodiments, a polynucleotide of the disclosure can include at least one miRNA in order to dampen the antigen presentation by antigen presenting cells. The miRNA can be the complete miRNA sequence, the miRNA seed sequence, the miRNA sequence without the seed, or a combination thereof. As a non-limiting example, a miRNA incorporated into a polynucleotide of the disclosure can be specific to the hematopoietic system. As another non-limiting example, a miRNA incorporated into a polynucleotide of the disclosure to dampen antigen presentation is miR-142-3p.

[0624] In some embodiments, a polynucleotide of the disclosure can include at least one miRNA in order to dampen expression of the encoded polypeptide in a tissue or cell of interest. As a non-limiting example, a polynucleotide of the disclosure can include at least one miR-122 binding site in order to dampen expression of an encoded polypeptide of interest in the liver. As another non-limiting example a polynucleotide of the disclosure can include at least one miR-142-3p binding site, miR-142-3p seed sequence, miR-142-3p binding site without the seed, miR-142-5p binding site, miR-142-5p seed sequence, miR-142-5p binding site without the seed, miR-146 binding site, miR-146 seed sequence and/or miR-146 binding site without the seed sequence.

[0625] In some embodiments, a polynucleotide of the disclosure can comprise at least one miRNA binding site in the 3′UTR in order to selectively degrade mRNA therapeutics in the immune cells to subdue unwanted immunogenic reactions caused by therapeutic delivery. As a non-limiting example, the miRNA binding site can make a polynucleotide of the disclosure more unstable in antigen presenting cells. Non-limiting examples of these miRNAs include mir-142-5p, mir-142-3p, mir-146a-5p, and mir-146-3p.

[0626] In one embodiment, a polynucleotide of the disclosure comprises at least one miRNA sequence in a region of the polynucleotide that can interact with a RNA binding protein.

[0627] In some embodiments, the polynucleotide of the disclosure (e.g., a RNA, e.g., a mRNA) comprising (i) a sequence-optimized nucleotide sequence (e.g., an ORF) and (ii) a miRNA binding site (e.g., a miRNA binding site that binds to miR-142).

[0628] In some embodiments, the polynucleotide of the disclosure comprises a uracil-modified sequence encoding a polypeptide disclosed herein and a miRNA binding site disclosed herein, e.g., a miRNA binding site that binds to miR-142. In some embodiments, the uracil-modified sequence encoding a polypeptide comprises at least one chemically modified nucleobase, e.g., 5-methoxyuracil. In some embodiments, at least 95% of a type of nucleobase (e.g., uracil) in a uracil-modified sequence encoding a polypeptide of the disclosure are modified nucleobases. In some embodiments, at least 95% of uricil in a uracil-modified sequence encoding a polypeptide is 5-methoxyuridine. In some embodiments, the polynucleotide comprising a nucleotide sequence encoding a polypeptide disclosed herein and a miRNA binding site is formulated with a delivery agent, e.g., a compound having the Formula (I), e.g., any of Compounds 1-147.

### Modified Polynucleotides Comprising Functional RNA Elements

[0629] The present disclosure provides synthetic polynucleotides comprising a modification (e.g., an RNA element), wherein the modification provides a desired translational regulatory activity. In some embodiments, the disclosure provides a polynucleotide comprising a 5′ untranslated region (UTR), an initiation codon, a full open reading frame encoding a polypeptide, a 3′ UTR, and at least one modification, wherein the at least one modification provides a desired translational regulatory activity, for example, a modification that promotes and/or enhances the translational fidelity of mRNA translation. In some embodiments, the desired translational regulatory activity is a cis-acting regulatory activity. In some embodiments, the desired translational regulatory activity is an increase in the residence time of the 43S pre-initiation complex (PIC) or ribosome at, or proximal to, the initiation codon. In some embodiments, the desired translational regulatory activity is an increase in the initiation of polypeptide synthesis at or from the initiation codon. In some embodiments, the desired translational regulatory activity is an increase in the amount of polypeptide translated from the full open reading frame. In some embodiments, the desired translational regulatory activity is an increase in the fidelity of initiation codon decoding by the PIC or ribosome. In some embodiments, the desired translational regulatory activity is inhibition or reduction of leaky scanning by the PIC or ribosome. In some embodiments, the desired translational regulatory activity is a decrease in the rate of decoding the initiation codon by the PIC or ribosome. In some embodiments, the desired translational regulatory activity is inhibition or reduction in the initiation of polypeptide synthesis at any codon within the mRNA other than the initiation codon. In some embodiments, the desired translational regulatory activity is inhibition or reduction of the amount of polypeptide translated from any open reading frame within the mRNA other than the full open reading frame. In some embodiments, the desired translational regulatory activity is inhibition or reduction in the production of aberrant translation products. In some embodiments, the desired translational regulatory activity is a combination of one or more of the foregoing translational regulatory activities.

[0630] Accordingly, the present disclosure provides a polynucleotide, e.g., an mRNA, comprising an RNA element that comprises a sequence and/or an RNA secondary structure(s) that provides a desired translational regulatory activity as described herein. In some aspects, the mRNA comprises an RNA element that comprises a sequence and/or an RNA secondary structure(s) that promotes and/or enhances the translational fidelity of mRNA translation. In some aspects, the mRNA comprises an RNA element that comprises a sequence and/or an RNA secondary structure(s) that provides a desired translational regulatory activity, such as inhibiting and/or reducing leaky scanning. In some aspects, the disclosure provides an mRNA that comprises an RNA element that comprises a sequence and/or an RNA secondary structure(s) that inhibits and/or reduces leaky scanning thereby promoting the translational fidelity of the mRNA.

[0631] In some embodiments, the RNA element comprises natural and/or modified nucleotides. In some embodiments, the RNA element comprises of a sequence of linked nucleotides, or derivatives or analogs thereof, that provides a desired translational regulatory activity as described herein. In some embodiments, the RNA element comprises a sequence of linked nucleotides, or derivatives or analogs thereof, that forms or folds into a stable RNA secondary structure, wherein the RNA secondary structure provides a desired translational regulatory activity as described herein. RNA elements can be identified and/or characterized based on the primary sequence of the element (e.g., GC-rich element), by RNA secondary structure formed by the element (e.g. stem-loop), by the location of the element within the RNA molecule (e.g., located within the 5′ UTR of an mRNA), by the biological function and/or activity of the element (e.g., “translational enhancer element”), and any combination thereof.

[0632] In some aspects, the disclosure provides an mRNA having one or more structural modifications that inhibits leaky scanning and/or promotes the translational fidelity of mRNA translation, wherein at least one of the structural modifications is a GC-rich RNA element. In some aspects, the disclosure provides a modified mRNA comprising at least one modification, wherein at least one modification is a GC-rich RNA element comprising a sequence of linked nucleotides, or derivatives or analogs thereof, preceding a Kozak consensus sequence in a 5′ UTR of the mRNA. In one embodiment, the GC-rich RNA element is located about 30, about 25, about 20, about 15, about 10, about 5, about 4, about 3, about 2, or about 1 nucleotide(s) upstream of a Kozak consensus sequence in the 5′ UTR of the mRNA. In another embodiment, the GC-rich RNA element is located 15-30, 15-20, 15-25, 10-15, or 5-10 nucleotides upstream of a Kozak consensus sequence. In another embodiment, the GC-rich RNA element is located immediately adjacent to a Kozak consensus sequence in the 5′ UTR of the mRNA.

[0633] In any of the foregoing or related aspects, the disclosure provides a GC-rich RNA element which comprises a sequence of 3-30, 5-25, 10-20, 15-20, about 20, about 15, about 12, about 10, about 7, about 6 or about 3 nucleotides, derivatives or analogs thereof, linked in any order, wherein the sequence composition is 70-80% cytosine, 60-70% cytosine, 50%-60% cytosine, 40-50% cytosine, 30-40% cytosine bases. In any of the foregoing or related aspects, the disclosure provides a GC-rich RNA element which comprises a sequence of 3-30, 5-25, 10-20, 15-20, about 20, about 15, about 12, about 10, about 7, about 6 or about 3 nucleotides, derivatives or analogs thereof, linked in any order, wherein the sequence composition is about 80% cytosine, about 70% cytosine, about 60% cytosine, about 50% cytosine, about 40% cytosine, or about 30% cytosine.

[0634] In any of the foregoing or related aspects, the disclosure provides a GC-rich RNA element which comprises a sequence of 20, 19, 18, 17, 16, 15, 14, 13, 12, 11, 10, 9, 8, 7, 6, 5, 4, or 3 nucleotides, or derivatives or analogs thereof, linked in any order, wherein the sequence composition is 70-80% cytosine, 60-70% cytosine, 50%-60% cytosine, 40-50% cytosine, or 30-40% cytosine. In any of the foregoing or related aspects, the disclosure provides a GC-rich RNA element which comprises a sequence of 20, 19, 18, 17, 16, 15, 14, 13, 12, 11, 10, 9, 8, 7, 6, 5, 4, or 3 nucleotides, or derivatives or analogs thereof, linked in any order, wherein the sequence composition is about 80% cytosine, about 70% cytosine, about 60% cytosine, about 50% cytosine, about 40% cytosine, or about 30% cytosine.

[0635] In some embodiments, the disclosure provides a modified mRNA comprising at least one modification, wherein at least one modification is a GC-rich RNA element comprising a sequence of linked nucleotides, or derivatives or analogs thereof, preceding a Kozak consensus sequence in a 5′ UTR of the mRNA, wherein the GC-rich RNA element is located about 30, about 25, about 20, about 15, about 10, about 5, about 4, about 3, about 2, or about 1 nucleotide(s) upstream of a Kozak consensus sequence in the 5′ UTR of the mRNA, and wherein the GC-rich RNA element comprises a sequence of 3, 4, 5, 6, 7, 8, 9, 10, 11, 12, 13, 14, 15, 16, 17, 18, 19, or 20 nucleotides, or derivatives or analogs thereof, linked in any order, wherein the sequence composition is >50% cytosine. In some embodiments, the sequence composition is >55% cytosine, >60% cytosine, >65% cytosine, >70% cytosine, >75% cytosine, >80% cytosine, >85% cytosine, or >90% cytosine.

[0636] In other aspects, the disclosure provides a modified mRNA comprising at least one modification, wherein at least one modification is a GC-rich RNA element comprising a sequence of linked nucleotides, or derivatives or analogs thereof, preceding a Kozak consensus sequence in a 5′ UTR of the mRNA, wherein the GC-rich RNA element is located about 30, about 25, about 20, about 15, about 10, about 5, about 4, about 3, about 2, or about 1 nucleotide(s) upstream of a Kozak consensus sequence in the 5′ UTR of the mRNA, and wherein the GC-rich RNA element comprises a sequence of about 3-30, 5-25, 10-20, 15-20 or about 20, about 15, about 12, about 10, about 6 or about 3 nucleotides, or derivatives or analogues thereof, wherein the sequence comprises a repeating GC-motif, wherein the repeating GC-motif is [CCG]n, wherein n=1 to 10, n=2 to 8, n=3 to 6, or n=4 to 5. In some embodiments, the sequence comprises a repeating GC-motif [CCG]n, wherein n=1, 2, 3, 4 or 5. In some embodiments, the sequence comprises a repeating GC-motif [CCG]n, wherein n=1, 2, or 3. In some embodiments, the sequence comprises a repeating GC-motif [CCG]n, wherein n=1. In some embodiments, the sequence comprises a repeating GC-motif [CCG]n, wherein n=2. In some embodiments, the sequence comprises a repeating GC-motif [CCG]n, wherein n=3. In some embodiments, the sequence comprises a repeating GC-motif [CCG]n, wherein n=4 (SEQ ID NO: 1384). In some embodiments, the sequence comprises a repeating GC-motif [CCG]n, wherein n=5 (SEQ ID NO: 1382).

[0637] In another aspect, the disclosure provides a modified mRNA comprising at least one modification, wherein at least one modification is a GC-rich RNA element comprising a sequence of linked nucleotides, or derivatives or analogs thereof, preceding a Kozak consensus sequence in a 5′ UTR of the mRNA, wherein the GC-rich RNA element comprises any one of the sequences set forth in Table 4. In one embodiment, the GC-rich RNA element is located about 30, about 25, about 20, about 15, about 10, about 5, about 4, about 3, about 2, or about 1 nucleotide(s) upstream of a Kozak consensus sequence in the 5′ UTR of the mRNA. In another embodiment, the GC-rich RNA element is located about 15-30, 15-20, 15-25, 10-15, or 5-10 nucleotides upstream of a Kozak consensus sequence. In another embodiment, the GC-rich RNA element is located immediately adjacent to a Kozak consensus sequence in the 5′ UTR of the mRNA.

[0638] In other aspects, the disclosure provides a modified mRNA comprising at least one modification, wherein at least one modification is a GC-rich RNA element comprising the sequence V1 [CCCCGGCGCC] (SEQ ID NO: 1383) as set forth in Table 4, or derivatives or analogs thereof, preceding a Kozak consensus sequence in the 5′ UTR of the mRNA. In some embodiments, the GC-rich element comprises the sequence V1 as set forth in Table 4 located immediately adjacent to and upstream of the Kozak consensus sequence in the 5′ UTR of the mRNA. In some embodiments, the GC-rich element comprises the sequence V1 as set forth in Table 4 located 1, 2, 3, 4, 5, 6, 7, 8, 9 or 10 bases upstream of the Kozak consensus sequence in the 5′ UTR of the mRNA. In other embodiments, the GC-rich element comprises the sequence V1 as set forth in Table 4 located 1-3, 3-5, 5-7, 7-9, 9-12, or 12-15 bases upstream of the Kozak consensus sequence in the 5′ UTR of the mRNA.

[0639] In other aspects, the disclosure provides a modified mRNA comprising at least one modification, wherein at least one modification is a GC-rich RNA element comprising the sequence V2 [CCCCGGC] as set forth in Table 4, or derivatives or analogs thereof, preceding a Kozak consensus sequence in the 5′ UTR of the mRNA. In some embodiments, the GC-rich element comprises the sequence V2 as set forth in Table 4 located immediately adjacent to and upstream of the Kozak consensus sequence in the 5′ UTR of the mRNA. In some embodiments, the GC-rich element comprises the sequence V2 as set forth in Table 4 located 1, 2, 3, 4, 5, 6, 7, 8, 9 or 10 bases upstream of the Kozak consensus sequence in the 5′ UTR of the mRNA. In other embodiments, the GC-rich element comprises the sequence V2 as set forth in Table 4 located 1-3, 3-5, 5-7, 7-9, 9-12, or 12-15 bases upstream of the Kozak consensus sequence in the 5′ UTR of the mRNA.

[0640] In other aspects, the disclosure provides a modified mRNA comprising at least one modification, wherein at least one modification is a GC-rich RNA element comprising the sequence EK [GCCGCC] as set forth in Table 4, or derivatives or analogs thereof, preceding a Kozak consensus sequence in the 5′ UTR of the mRNA. In some embodiments, the GC-rich element comprises the sequence EK as set forth in Table 4 located immediately adjacent to and upstream of the Kozak consensus sequence in the 5′ UTR of the mRNA. In some embodiments, the GC-rich element comprises the sequence EK as set forth in Table 4 located 1, 2, 3, 4, 5, 6, 7, 8, 9 or 10 bases upstream of the Kozak consensus sequence in the 5′ UTR of the mRNA. In other embodiments, the GC-rich element comprises the sequence EK as set forth in Table 4 located 1-3, 3-5, 5-7, 7-9, 9-12, or 12-15 bases upstream of the Kozak consensus sequence in the 5′ UTR of the mRNA.

[0641] In yet other aspects, the disclosure provides a modified mRNA comprising at least one modification, wherein at least one modification is a GC-rich RNA element comprising the sequence V1 [CCCCGGCGCC] (SEQ ID NO: 1383) as set forth in Table 4, or derivatives or analogs thereof, preceding a Kozak consensus sequence in the 5′ UTR of the mRNA, wherein the 5′ UTR comprises the following sequence shown in Table 4:

(SEQ ID NO: 1384)
GGGAAATAAGAGAGAAAAGAAGAGTAAGAAGAAATATAAGA.

[0642] In some embodiments, the GC-rich element comprises the sequence V1 as set forth in Table 4 located immediately adjacent to and upstream of the Kozak consensus sequence in the 5′ UTR sequence shown in Table 4. In some embodiments, the GC-rich element comprises the sequence V1 as set forth in Table 4 located 1, 2, 3, 4, 5, 6, 7, 8, 9 or 10 bases upstream of the Kozak consensus sequence in the 5′ UTR of the mRNA, wherein the 5′ UTR comprises the following sequence shown in Table 4:

(SEQ ID NO: 1384)
GGGAAATAAGAGAGAAAAGAAGAGTAAGAAGAAATATAAGA.

[0643] In other embodiments, the GC-rich element comprises the sequence V1 as set forth in Table 4 located 1-3, 3-5, 5-7, 7-9, 9-12, or 12-15 bases upstream of the Kozak consensus sequence in the 5′ UTR of the mRNA, wherein the 5′ UTR comprises the following sequence shown in Table 4:

(SEQ ID NO: 1384)
GGGAAATAAGAGAGAAAAGAAGAGTAAGAAGAAATATAAGA.

[0644] In some embodiments, the 5′ UTR comprises the following sequence set forth in Table 4:

(SEQ ID NO: 1385)
GGGAAATAAGAGAGAAAAGAAGAGTAAGAAGAAATATAAGACCCCGGCGC
CGCCACC

[0645] In some embodiments, the 5′ UTR comprises the following sequence set forth in Table 4:

(SEQ ID NO: 1386)
GGGAAATAAGAGAGAAAAGAAGAGTAAGAAGAAATATAAGACCCCGGCGC
CACC

TABLE 4

| SEQ ID | | |
|---|---|---|
| NO: | 5′ UTRs | 5′UTR Sequence |
| 1380 | Standard | GGGAAATAAGAGAGAAAAGAAGAGTAAGAAGA |
| | | AATATAAGAGCCACC |
| 1384 | UTR | GGGAAATAAGAGAGAAAAGAAGAGTAAGAAG |
| | | AAATATAAGA |
| 1385 | V1-UTR | GGGAAATAAGAGAGAAAAGAAGAGTAAGAAGA |
| | | AATATAAGACCCCGGCGCCGCCACC |
| 1386 | V2-UTR | GGGAAATAAGAGAGAAAAGAAGAGTAAGAAGA |
| | | AATATAAGACCCCGGCGCCACC |
| | GC-Rich RNA Elements | Sequence |
| | K0 (Traditional Kozak | [GCCA/GCC] |
| | consensus) | |
| | EK | [GCCGCC] |
| 1383 | V1 | [CCCCGGCGCC] |
| | V2 | [CCCCGGC] |
| | (CCG)ₙ, where ₙ = 1-10 | [CCG]ₙ |
| | (GCC)ₙ, where ₙ = 1-10 | [GCC]ₙ |
| 1381 | (CCG)ₙ, where ₙ = 4 | [CCGCCGCCGCCG] |
| 1382 | (CCG)ₙ, where ₙ = 5 | [CCGCCGCCGCCGCCG] |

[0646] In another aspect, the disclosure provides a modified mRNA comprising at least one modification, wherein at least one modification is a GC-rich RNA element comprising a stable RNA secondary structure comprising a sequence of nucleotides, or derivatives or analogs thereof, linked in an order which forms a hairpin or a stem-loop. In one embodiment, the stable RNA secondary structure is upstream of the Kozak consensus sequence. In another embodiment, the stable RNA secondary structure is located about 30, about 25, about 20, about 15, about 10, or about 5 nucleotides upstream of the Kozak consensus sequence. In another embodiment, the stable RNA secondary structure is located about 20, about 15, about 10 or about 5 nucleotides upstream of the Kozak consensus sequence. In another embodiment, the stable RNA secondary structure is located about 5, about 4, about 3, about 2, about 1 nucleotides upstream of the Kozak consensus sequence. In another embodiment, the stable RNA secondary structure is located about 15-30, about 15-20, about 15-25, about 10-15, or about 5-10 nucleotides upstream of the Kozak consensus sequence. In another embodiment, the stable RNA secondary structure is located 12-15 nucleotides upstream of the Kozak consensus sequence. In another embodiment, the stable RNA secondary structure has a deltaG of about −30 kcal/mol, about −20 to −30 kcal/mol, about −20 kcal/mol, about −10 to −20 kcal/mol, about −10 kcal/mol, about −5 to −10 kcal/mol.

[0647] In another embodiment, the modification is operably linked to an open reading frame encoding a polypeptide and wherein the modification and the open reading frame are heterologous.

[0648] In another embodiment, the sequence of the GC-rich RNA element is comprised exclusively of guanine (G) and cytosine (C) nucleobases.

[0649] RNA elements that provide a desired translational regulatory activity as described herein can be identified and characterized using known techniques, such as ribosome profiling. Ribosome profiling is a technique that allows the determination of the positions of PICs and/or ribosomes bound to mRNAs (see e.g., Ingolia et al., (2009) Science 324(5924):218-23, incorporated herein by reference). The technique is based on protecting a region or segment of mRNA, by the PIC and/or ribosome, from nuclease digestion. Protection results in the generation of a 30-bp fragment of RNA termed a ‘footprint’. The sequence and frequency of RNA footprints can be analyzed by methods known in the art (e.g., RNA-seq). The footprint is roughly centered on the A-site of the ribosome. If the PIC or ribosome dwells at a particular position or location along an mRNA, footprints generated at these position would be relatively common. Studies have shown that more footprints are generated at positions where the PIC and/or ribosome exhibits decreased processivity and fewer footprints where the PIC and/or ribosome exhibits increased processivity (Gardin et al., (2014) eLife 3:e03735). In some embodiments, residence time or the time of occupancy of a the PIC or ribosome at a discrete position or location along an polynucleotide comprising any one or more of the RNA elements described herein is determined by ribosome profiling.

### Delivery Vehicles

### General

[0650] The mRNAs of the disclosure may be formulated in nanoparticles or other delivery vehicles, e.g., to protect them from degradation when delivered to a subject. Illustrative nanoparticles are described in Panyam, J. & Labhasetwar, V. Adv. Drug Deliv. Rev. 55, 329-347 (2003) and Peer, D. et al. Nature Nanotech. 2, 751-760 (2007). In certain embodiments, an mRNA of the disclosure is encapsulated within a nanoparticle. In particular embodiments, a nanoparticle is a particle having at least one dimension (e.g., a diameter) less than or equal to 1000 nM, less than or equal to 500 nM or less than or equal to 100 nM. In particular embodiments, a nanoparticle includes a lipid. Lipid nanoparticles include, but are not limited to, liposomes and micelles. Any of a number of lipids may be present, including cationic and/or ionizable lipids, anionic lipids, neutral lipids, amphipathic lipids, PEGylated lipids, and/or structural lipids. Such lipids can be used alone or in combination. In particular embodiments, a lipid nanoparticle comprises one or more mRNAs described herein.

[0651] In some embodiments, the lipid nanoparticle formulations of the mRNAs described herein may include one or more (e.g., 1, 2, 3, 4, 5, 6, 7, or 8) cationic and/or ionizable lipids. Such cationic and/or ionizable lipids include, but are not limited to, 3-(didodecylamino)-N1,N1,4-tridodecyl-1-piperazineethanamine (KL10), N1-[2-(didodecylamino)ethyl]-N1,N4,N4-tridodecyl-1,4-piperazinediethanamine (KL22), 14,25-ditridecyl-15,18,21,24-tetraaza-octatriacontane (KL25), 1,2-dilinoleyloxy-N,N-dimethylaminopropane (DLin-DMA), 2,2-dilinoleyl-4-dimethylaminomethyl-[1,3]-dioxolane (DLin-K-DMA), heptatriaconta-6,9,28,31-tetraen-19-yl 4-(dimethylamino)butanoate (DLin-MC3-DMA), 2,2-dilinoleyl-4-(2-dimethylaminoethyl)-[1,3]-dioxolane (DLin-KC2-DMA), 2-({8-[(3β)-cholest-5-en-3-yloxy]octyl}oxy)-N,N-dimethyl-3-[(9Z,12Z)-octadeca-9,12-dien-1-yloxy]propan-1-amine (Octyl-CLinDMA), (2R)-2-({8-[(3β)-cholest-5-en-3-yloxy]octyl}oxy)-N,N-dimethyl-3-[(9Z,12Z)-octadeca-9,12-dien-1-yloxy]propan-1-amine (Octyl-CLinDMA (2R)), (2S)-2-({8-[(3β)-cholest-5-en-3-yloxy]octyl}oxy)-N,N-dimethyl-3-[(9Z,12Z)-octadeca-9,12-dien-1-yloxy]propan-1-amine (Octyl-CLinDMA (2S)).N,N-dioleyl-N,N-dimethylammonium chloride (“DODAC”); N-(2,3-dioleyloxy)propyl-N,N—N-triethylammonium chloride (“DOTMA”); N,N-distearyl-N,N-dimethylammonium bromide (“DDAB”); N-(2,3-dioleoyloxy)propyl)-N,N,N-trimethylammonium chloride (“DOTAP”); 1,2-Dioleyloxy-3-trimethylaminopropane chloride salt (“DOTAP.Cl”); 3-β-(N—(N′,N′-dimethylaminoethane)-carbamoyl)cholesterol (“DC-Chol”), N-(1-(2,3-dioleyloxy)propyl)-N-2-(sperminecarboxamido)ethyl)-N,N-dimethyl-ammonium trifluoracetate (“DOSPA”), dioctadecylamidoglycyl carboxyspermine (“DOGS”), 1,2-dioleoyl-3-dimethylammonium propane (“DODAP”), N,N-dimethyl-2,3-dioleyloxy)propylamine (“DODMA”), and N-(1,2-dimyristyloxyprop-3-yl)-N,N-dimethyl-N-hydroxyethyl ammonium bromide (“DMRIE”). Additionally, a number of commercial preparations of cationic and/or ionizable lipids can be used, such as, e.g., LIPOFECTIN® (including DOTMA and DOPE, available from GIBCO/BRL), and LIPOFECTAMINE® (including DOSPA and DOPE, available from GIBCO/BRL). KL10, KL22, and KL25 are described, for example, in U.S. Pat. No. 8,691,750, which is incorporated herein by reference in its entirety. In particular embodiments, the lipid is DLin-MC3-DMA or DLin-KC2-DMA.

[0652] Anionic lipids suitable for use in lipid nanoparticles of the disclosure include, but are not limited to, phosphatidylglycerol, cardiolipin, diacylphosphatidylserine, diacylphosphatidic acid, N-dodecanoyl phosphatidylethanoloamine, N-succinyl phosphatidylethanolamine, N-glutaryl phosphatidylethanolamine, lysylphosphatidylglycerol, and other anionic modifying groups joined to neutral lipids.

[0653] Neutral lipids suitable for use in lipid nanoparticles of the disclosure include, but are not limited to, diacylphosphatidylcholine, diacylphosphatidylethanolamine, ceramide, sphingomyelin, dihydrosphingomyelin, cephalin, and cerebrosides. Lipids having a variety of acyl chain groups of varying chain length and degree of saturation are available or may be isolated or synthesized by well-known techniques. Additionally, lipids having mixtures of saturated and unsaturated fatty acid chains can be used. In some embodiments, the neutral lipids used in the disclosure are DOPE, DSPC, DPPC, POPC, or any related phosphatidylcholine. In some embodiments, the neutral lipid may be composed of sphingomyelin, dihydrosphingomyeline, or phospholipids with other head groups, such as serine and inositol.

[0654] In some embodiments, amphipathic lipids are included in nanoparticles of the disclosure. Exemplary amphipathic lipids suitable for use in nanoparticles of the disclosure include, but are not limited to, sphingolipids, phospholipids, and aminolipids. In some embodiments, a phospholipid is selected from the group consisting of 1,2-dilinoleoyl-sn-glycero-3-phosphocholine (DLPC), 1,2-dimyristoyl-sn-glycero-phosphocholine (DMPC), 1,2-dioleoyl-sn-glycero-3-phosphocholine (DOPC), 1,2-dipalmitoyl-sn-glycero-3-phosphocholine (DPPC), 1,2-distearoyl-sn-glycero-3-phosphocholine (DSPC), 1,2-diundecanoyl-sn-glycero-phosphocholine (DUPC), 1-palmitoyl-2-oleoyl-sn-glycero-3-phosphocholine (POPC), 1,2-di-O-octadecenyl-sn-glycero-3-phosphocholine (18:0 Diether PC), 1-oleoyl-2-cholesterylhemisuccinoyl-sn-glycero-3-phosphocholine (OChemsPC), 1-hexadecyl-sn-glycero-3-phosphocholine (C16 Lyso PC), 1,2-dilinolenoyl-sn-glycero-3-phosphocholine, 1,2-diarachidonoyl-sn-glycero-3-phosphocholine, 1,2-didocosahexaenoyl-sn-glycero-3-phosphocholine, 1,2-dioleoyl-sn-glycero-3-phosphoethanolamine (DOPE), 1,2-diphytanoyl-sn-glycero-3-phosphoethanolamine (ME 16.0 PE), 1,2-distearoyl-sn-glycero-3-phosphoethanolamine, 1,2-dilinoleoyl-sn-glycero-3-phosphoethanolamine, 1,2-dilinolenoyl-sn-glycero-3-phosphoethanolamine, 1,2-diarachidonoyl-sn-glycero-3-phosphoethanolamine, 1,2-didocosahexaenoyl-sn-glycero-3-phosphoethanolamine, 1,2-dioleoyl-sn-glycero-3-phospho-rac-(1-glycerol) sodium salt (DOPG), and sphingomyelin. Other phosphorus-lacking compounds, such as sphingolipids, glycosphingolipid families, diacylglycerols, and β-acyloxyacids, may also be used. Additionally, such amphipathic lipids can be readily mixed with other lipids, such as triglycerides and sterols.

[0655] In some embodiments, the lipid component of a nanoparticle of the disclosure may include one or more PEGylated lipids. A PEGylated lipid (also known as a PEG lipid or a PEG-modified lipid) is a lipid modified with polyethylene glycol. The lipid component may include one or more PEGylated lipids. A PEGylated lipid may be selected from the non-limiting group consisting of PEG-modified phosphatidylethanolamines, PEG-modified phosphatidic acids, PEG-modified ceramides, PEG-modified dialkylamines, PEG-modified diacylglycerols, and PEG-modified dialkylglycerols. For example, a PEGylated lipid may be PEG-c-DOMG, PEG-DMG, PEG-DLPE, PEG-DMPE, PEG-DPPC, or a PEG-DSPE lipid.

[0656] A lipid nanoparticle of the disclosure may include one or more structural lipids. Exemplary, non-limiting structural lipids that may be present in the lipid nanoparticles of the disclosure include cholesterol, fecosterol, sitosterol, campesterol, stigmasterol, brassicasterol, ergosterol, tomatidine, tomatine, ursolic acid, or alpha-tocopherol.

[0657] In some embodiments, one or more mRNA of the disclosure may be formulated in a lipid nanoparticle having a diameter from about 1 nm to about 900 nm, e.g., about 1 nm to about 100 nm, about 1 nm to about 200 nm, about 1 nm to about 300 nm, about 1 nm to about 400 nm, about 1 nm to about 500 nm, about 1 nm to about 600 nm, about 1 nm to about 700 nm, about 1 nm to 800 nm, about 1 nm to about 900 nm. In some embodiments, the nanoparticle may have a diameter from about 10 nm to about 300 nm, about 20 nm to about 200 nm, about 30 nm to about 100 nm, or about 40 nm to about 80 nm. In some embodiments, the nanoparticle may have a diameter from about 30 nm to about 300 nm, about 40 nm to about 200 nm, about 50 nm to about 150 nm, about 70 to about 110 nm, or about 80 nm to about 120 nm. In one embodiment, an mRNA may be formulated in a lipid nanoparticle having a diameter from about 10 to about 100 nm including ranges in between such as, but not limited to, about 10 to about 20 nm, about 10 to about 30 nm, about 10 to about 40 nm, about 10 to about 50 nm, about 10 to about 60 nm, about 10 to about 70 nm, about 10 to about 80 nm, about 10 to about 90 nm, about 20 to about 30 nm, about 20 to about 40 nm, about 20 to about 50 nm, about 20 to about 60 nm, about 20 to about 70 nm, about 20 to about 80 nm, about 20 to about 90 nm, about 20 to about 100 nm, about 30 to about 40 nm, about 30 to about 50 nm, about 30 to about 60 nm, about 30 to about 70 nm, about 30 to about 80 nm, about 30 to about 90 nm, about 30 to about 100 nm, about 40 to about 50 nm, about 40 to about 60 nm, about 40 to about 70 nm, about 40 to about 80 nm, about 40 to about 90 nm, about 40 to about 100 nm, about 50 to about 60 nm, about 50 to about 70 nm about 50 to about 80 nm, about 50 to about 90 nm, about 50 to about 100 nm, about 60 to about 70 nm, about 60 to about 80 nm, about 60 to about 90 nm, about 60 to about 100 nm, about 70 to about 80 nm, about 70 to about 90 nm, about 70 to about 100 nm, about 80 to about 90 nm, about 80 to about 100 nm, and/or about 90 to about 100 nm. In one embodiment, an mRNA may be formulated in a lipid nanoparticle having a diameter from about 30 nm to about 300 nm, about 40 nm to about 200 nm, about 50 nm to about 150 nm, about 70 to about 110 nm, or about 80 nm to about 120 nm including ranges in between.

[0658] In some embodiments, a lipid nanoparticle may have a diameter greater than 100 nm, greater than 150 nm, greater than 200 nm, greater than 250 nm, greater than 300 nm, greater than 350 nm, greater than 400 nm, greater than 450 nm, greater than 500 nm, greater than 550 nm, greater than 600 nm, greater than 650 nm, greater than 700 nm, greater than 750 nm, greater than 800 nm, greater than 850 nm, greater than 900 nm, or greater than 950 nm.

[0659] In some embodiments, the particle size of the lipid nanoparticle may be increased and/or decreased. The change in particle size may be able to help counter a biological reaction such as, but not limited to, inflammation, or may increase the biological effect of the mRNA delivered to a patient or subject.

[0660] In certain embodiments, it is desirable to target a nanoparticle, e.g., a lipid nanoparticle, of the disclosure using a targeting moiety that is specific to a cell type and/or tissue type. In some embodiments, a nanoparticle may be targeted to a particular cell, tissue, and/or organ using a targeting moiety. In particular embodiments, a nanoparticle comprises one or more mRNA described herein and a targeting moiety. Exemplary non-limiting targeting moieties include ligands, cell surface receptors, glycoproteins, vitamins (e.g., riboflavin) and antibodies (e.g., full-length antibodies, antibody fragments (e.g., Fv fragments, single chain Fv (scFv) fragments, Fab′ fragments, or F(ab′)2 fragments), single domain antibodies, camelid antibodies and fragments thereof, human antibodies and fragments thereof, monoclonal antibodies, and multispecific antibodies (e.g, bispecific antibodies)). In some embodiments, the targeting moiety may be a polypeptide. The targeting moiety may include the entire polypeptide (e.g., peptide or protein) or fragments thereof. A targeting moiety is typically positioned on the outer surface of the nanoparticle in such a manner that the targeting moiety is available for interaction with the target, for example, a cell surface receptor. A variety of different targeting moieties and methods are known and available in the art, including those described, e.g., in Sapra et al., Prog. Lipid Res. 42(5):439-62, 2003 and Abra et al., J. Liposome Res. 12:1-3, 2002.

[0661] In some embodiments, a lipid nanoparticle (e.g., a liposome) may include a surface coating of hydrophilic polymer chains, such as polyethylene glycol (PEG) chains (see, e.g., Allen et al., Biochimica et Biophysica Acta 1237: 99-108, 1995; DeFrees et al., Journal of the American Chemistry Society 118: 6101-6104, 1996; Blume et al., Biochimica et Biophysica Acta 1149: 180-184, 1993; Klibanov et al., Journal of Liposome Research 2: 321-334, 1992; U.S. Pat. No. 5,013,556; Zalipsky, Bioconjugate Chemistry 4: 296-299, 1993; Zalipsky, FEBS Letters 353: 71-74, 1994; Zalipsky, in Stealth Liposomes Chapter 9 (Lasic and Martin, Eds) CRC Press, Boca Raton Fla., 1995). In one approach, a targeting moiety for targeting the lipid nanoparticle is linked to the polar head group of lipids forming the nanoparticle. In another approach, the targeting moiety is attached to the distal ends of the PEG chains forming the hydrophilic polymer coating (see, e.g., Klibanov et al., Journal of Liposome Research 2: 321-334, 1992; Kirpotin et al., FEBS Letters 388: 115-118, 1996).

[0662] Standard methods for coupling the targeting moiety or moieties may be used. For example, phosphatidylethanolamine, which can be activated for attachment of targeting moieties, or derivatized lipophilic compounds, such as lipid-derivatized bleomycin, can be used. Antibody-targeted liposomes can be constructed using, for instance, liposomes that incorporate protein A (see, e.g., Renneisen et al., J. Bio. Chem., 265:16337-16342, 1990 and Leonetti et al., Proc. Natl. Acad. Sci. (USA), 87:2448-2451, 1990). Other examples of antibody conjugation are disclosed in U.S. Pat. No. 6,027,726. Examples of targeting moieties can also include other polypeptides that are specific to cellular components, including antigens associated with neoplasms or tumors. Polypeptides used as targeting moieties can be attached to the liposomes via covalent bonds (see, for example Heath, Covalent Attachment of Proteins to Liposomes, 149 Methods in Enzymology 111-119 (Academic Press, Inc. 1987)). Other targeting methods include the biotin-avidin system.

[0663] In some embodiments, a lipid nanoparticle of the disclosure includes a targeting moiety that targets the lipid nanoparticle to a cell including, but not limited to, hepatocytes, colon cells, epithelial cells, hematopoietic cells, epithelial cells, endothelial cells, lung cells, bone cells, stem cells, mesenchymal cells, neural cells, cardiac cells, adipocytes, vascular smooth muscle cells, cardiomyocytes, skeletal muscle cells, beta cells, pituitary cells, synovial lining cells, ovarian cells, testicular cells, fibroblasts, B cells, T cells, reticulocytes, leukocytes, granulocytes, and tumor cells (including primary tumor cells and metastatic tumor cells). In particular embodiments, the targeting moiety targets the lipid nanoparticle to a hepatocyte. In other embodiments, the targeting moiety targets the lipid nanoparticle to a colon cell. In some embodiments, the targeting moiety targets the lipid nanoparticle to a liver cancer cell (e.g., a hepatocellular carcinoma cell) or a colorectal cancer cell (e.g., a primary tumor or a metastasis).

[0664] Lipid Nanoparticles

[0665] In one set of embodiments, lipid nanoparticles (LNPs) are provided. In one embodiment, a lipid nanoparticle comprises lipids including an ionizable lipid, a structural lipid, a phospholipid, and one or more mRNAs. Each of the LNPs described herein may be used as a formulation for the mRNA described herein. In one embodiment, a lipid nanoparticle comprises an ionizable lipid, a structural lipid, a phospholipid, a PEG-modified lipid and one or more mRNAs. In some embodiments, the LNP comprises an ionizable lipid, a PEG-modified lipid, a sterol and a phospholipid. In some embodiments, the LNP has a molar ratio of about 20-60% ionizable lipid:about 5-25% phospholipid:about 25-55% sterol; and about 0.5-15% PEG-modified lipid. In some embodiments, the LNP comprises a molar ratio of about 50% ionizable lipid, about 1.5% PEG-modified lipid, about 38.5% cholesterol and about 10% phospholipid. In some embodiments, the LNP comprises a molar ratio of about 55% ionizable lipid, about 2.5% PEG lipid, about 32.5% cholesterol and about 10% phospholipid. In some embodiments, the ionizable lipid is an ionizable amino or cationic lipid and the neutral lipid is a phospholipid, and the sterol is a cholesterol. In some embodiments, the LNP has a molar ratio of 50:38.5:10:1.5 of ionizable lipid:cholesterol:DSPC (1,2-dioctadecanoyl-sn-glycero-3-phosphocholine):PEG-DMG.

[0666] a. Ionizable Lipid

[0667] The present disclosure provides pharmaceutical compositions with advantageous properties. For example, the lipids described herein (e.g. those having any of Formula (I), (IA), (II), (IIa), (IIb), (IIc), (IId), (IIe), (III), (IV), (V), or (VI) may be advantageously used in lipid nanoparticle compositions for the delivery of therapeutic and/or prophylactic agents to mammalian cells or organs. For example, the lipids described herein have little or no immunogenicity. For example, the lipid compounds disclosed herein have a lower immunogenicity as compared to a reference lipid (e.g., MC3, KC2, or DLinDMA). For example, a formulation comprising a lipid disclosed herein and a therapeutic or prophylactic agent has an increased therapeutic index as compared to a corresponding formulation which comprises a reference lipid (e.g., MC3, KC2, or DLinDMA) and the same therapeutic or prophylactic agent. In particular, the present application provides pharmaceutical compositions comprising:

[0668] (a) a polynucleotide comprising a nucleotide sequence encoding a polypeptide of interest; and

[0669] (b) a delivery agent.

[0670] In some embodiments, the delivery agent comprises a lipid compound having the Formula (I)

[chemical structure]

[0671] wherein

[0672] R₁ is selected from the group consisting of C₅₋₃₀ alkyl, C₅₋₂₀ alkenyl, —R*YR″, —YR″, and —R″M′R′;

[0673] R₂ and R₃ are independently selected from the group consisting of H, C₁₋₁₄ alkyl, C₂₋₁₄ alkenyl, —R*YR″, —YR″, and —R*OR″, or R₂ and R₃, together with the atom to which they are attached, form a heterocycle or carbocycle;

[0674] R₄ is selected from the group consisting of a C₃₋₆ carbocycle, —(CH₂)ₙQ, —(CH₂)ₙCHQR, —CHQR, —CQ(R)₂, and unsubstituted C₁₋₆ alkyl, where Q is selected from a carbocycle, heterocycle, —OR, —O(CH₂)ₙN(R)₂, —C(O)OR, —OC(O)R, —CX₃, —CX₂H, —CXH₂, —CN, —N(R)₂, —C(O)N(R)₂, —N(R)C(O)R, —N(R)S(O)₂R, —N(R)C(O)N(R)₂, —N(R)C(S)N(R)₂, —N(R)R₈, —O(CH₂)ₙOR, —N(R)C(═NR₉)N(R)₂, —N(R)C(═CHR)N(R)₂, —OC(O)N(R)₂, —N(R)C(O)OR, —N(OR)C(O)R, —N(OR)S(O)₂R, —N(OR)C(O)OR, —N(OR)C(O)N(R)₂, —N(OR)C(S)N(R)₂, —N(OR)C(═NR₉)N(R)₂, —N(OR)C(═CHR₉)N(R)₂, —C(═NR₉)N(R)₂, —C(═NR₉)R, —C(O)N(R)OR, and —C(R)N(R)₂C(O)OR, and each n is independently selected from 1, 2, 3, 4, and 5;

[0675] each R₅ is independently selected from the group consisting of C₁₋₃ alkyl, C₂₋₃ alkenyl, and H;

[0676] each R₆ is independently selected from the group consisting of C₁₋₃ alkyl, C₂₋₃ alkenyl, and H;

[0677] M and M′ are independently selected from —C(O)O—, —OC(O)—, —C(O)N(R′)—, —N(R′)C(O)—, —C(O)—, —C(S)—, —C(S)S—, —SC(S)—, —CH(OH)—, —P(O)(OR′)O—, —S(O)₂—, —S—S—, an aryl group, and a heteroaryl group;

[0678] R₇ is selected from the group consisting of C₁₋₃ alkyl, C₂₋₃ alkenyl, and H;

[0679] R₈ is selected from the group consisting of C₃₋₆ carbocycle and heterocycle;

[0680] R₉ is selected from the group consisting of H, CN, NO₂, C₁₋₆ alkyl, —OR, —S(O)₂R, —S(O)₂N(R)₂, C₂₋₆ alkenyl, C₃₋₆ carbocycle and heterocycle;

[0681] each R is independently selected from the group consisting of C₁₋₃ alkyl, C₂₋₃ alkenyl, and H;

[0682] each R′ is independently selected from the group consisting of C₁₋₁₈ alkyl, C₂₋₁₈ alkenyl, —R*YR″, —YR″, and H;
[0683] each R″ is independently selected from the group consisting of C₃₋₁₄ alkyl and C₃₋₁₄ alkenyl;

[0684] each R* is independently selected from the group consisting of C₁₋₁₂ alkyl and C₂₋₁₂ alkenyl;

[0685] each Y is independently a C₃₋₆ carbocycle;

[0686] each X is independently selected from the group consisting of F, Cl, Br, and I; and m is selected from 5, 6, 7, 8, 9, 10, 11, 12, and 13,

[0687] or salts or stereoisomers thereof.

[0688] In some embodiments, a subset of compounds of Formula (I) includes those in which

[0689] R₁ is selected from the group consisting of C₅₋₂₀ alkyl, C₅₋₂₀ alkenyl, —R*YR″, —YR″, and —R″M′R′;

[0690] R₂ and R₃ are independently selected from the group consisting of H, C₁₋₁₄ alkyl, C₂₋₁₄ alkenyl, —R*YR″, —YR″, and —R*OR″, or R₂ and R₃, together with the atom to which they are attached, form a heterocycle or carbocycle;

[0691] R₄ is selected from the group consisting of a C₃₋₆ carbocycle, —(CH₂)ₙQ, —(CH₂)ₙCHQR, —CHQR, —CQ(R)₂, and unsubstituted C₁₋₆ alkyl, where Q is selected from a carbocycle, heterocycle, —OR, —O(CH₂)ₙN(R)₂, —C(O)OR, —OC(O)R, —CX₃, —CX₂H, —CXH₂, —CN, —N(R)₂, —C(O)N(R)₂, —N(R)C(O)R, —N(R)S(O)₂R, —N(R)C(O)N(R)₂, —N(R)C(S)N(R)₂, and —C(R)N(R)₂C(O)OR, and each n is independently selected from 1, 2, 3, 4, and 5;

[0692] each R₅ is independently selected from the group consisting of C₁₋₃ alkyl, C₂₋₃ alkenyl, and H;

[0693] each R₆ is independently selected from the group consisting of C₁₋₃ alkyl, C₂₋₃ alkenyl, and H;

[0694] M and M′ are independently selected from —C(O)O—, —OC(O)—, —C(O)N(R′)—, —N(R′)C(O)—, —C(O)—, —C(S)—, —C(S)S—, —SC(S)—, —CH(OH)—, —P(O)(OR′)O—, —S(O)₂—, an aryl group, and a heteroaryl group;

[0695] R₇ is selected from the group consisting of C₁₋₃ alkyl, C₂₋₃ alkenyl, and H;

[0696] each R is independently selected from the group consisting of C₁₋₃ alkyl, C₂₋₃ alkenyl, and H;

[0697] each R′ is independently selected from the group consisting of C₁₋₁₈ alkyl, C₂₋₁₈ alkenyl, —R*YR″, —YR″, and H;

[0698] each R″ is independently selected from the group consisting of C₃₋₁₄ alkyl and C₃₋₁₄ alkenyl;

[0699] each R* is independently selected from the group consisting of C₁₋₁₂ alkyl and C₂₋₁₂ alkenyl;

[0700] each Y is independently a C₃₋₆ carbocycle;

[0701] each X is independently selected from the group consisting of F, Cl, Br, and I; and m is selected from 5, 6, 7, 8, 9, 10, 11, 12, and 13,

[0702] or salts or stereoisomers thereof, wherein alkyl and alkenyl groups may be linear or branched.

[0703] In some embodiments, a subset of compounds of Formula (I) includes those in which when R₄ is —(CH₂)ₙQ, —(CH₂)ₙCHQR, —CHQR, or —CQ(R)₂, then (i) Q is not —N(R)₂ when n is 1, 2, 3, 4 or 5, or (ii) Q is not 5, 6, or 7-membered heterocycloalkyl when n is 1 or 2.

[0704] In another embodiments, another subset of compounds of Formula (I) includes those in which

[0705] R₁ is selected from the group consisting of C₅₋₃₀ alkyl, C₅₋₂₀ alkenyl, —R*YR″, —YR″, and —R″M′R′;

[0706] R₂ and R₃ are independently selected from the group consisting of H, C₁₋₁₄ alkyl, C₂₋₁₄ alkenyl, —R*YR″, —YR″, and —R*OR″, or R₂ and R₃, together with the atom to which they are attached, form a heterocycle or carbocycle;

[0707] R₄ is selected from the group consisting of a C₃₋₆ carbocycle, —(CH₂)ₙQ, —(CH₂)ₙCHQR, —CHQR, —CQ(R)₂, and unsubstituted C₁₋₆ alkyl, where Q is selected from a C₃₋₆ carbocycle, a 5- to 14-membered heteroaryl having one or more heteroatoms selected from N, O, and S, —OR, —O(CH₂)ₙN(R)₂, —C(O)OR, —OC(O)R, —CX₃, —CX₂H, —CXH₂, —CN, —C(O)N(R)₂, —N(R)C(O)R, —N(R)S(O)₂R, —N(R)C(O)N(R)₂, —N(R)C(S)N(R)₂, —CRN(R)₂C(O)OR, —N(R)R₈, —O(CH₂)ₙOR, —N(R)C(═NR₉)N(R)₂, —N(R)C(═CHR₉)N(R)₂, —O C(O)N(R)₂, —N(R)C(O)OR, —N(OR)C(O)R, —N(OR)S(O)₂R, —N(OR)C(O)OR, —N(OR)C(O)N(R)₂, —N(OR)C(S)N(R)₂, —N(OR)C(═NR₉)N(R)₂, —N(OR)C(═CHR₉)N(R)₂, —C(═NR₉)N(R)₂, —C (═NR₉)R, —C(O)N(R)OR, and a 5- to 14-membered heterocycloalkyl having one or more heteroatoms selected from N, O, and S which is substituted with one or more substituents selected from oxo (═O), OH, amino, and C₁₋₃ alkyl, and each n is independently selected from 1, 2, 3, 4, and 5;

[0708] each R₅ is independently selected from the group consisting of C₁₋₃ alkyl, C₂₋₃ alkenyl, and H;

[0709] each R₆ is independently selected from the group consisting of C₁₋₃ alkyl, C₂₋₃ alkenyl, and H;

[0710] M and M′ are independently selected from —C(O)O—, —OC(O)—, —C(O)N(R′)—, —N(R′)C(O)—, —C(O)—, —C(S)—, —C(S)S—, —SC(S)—, —CH(OH)—, —P(O)(OR′)O—, —S(O)₂—, —S—S—, an aryl group, and a heteroaryl group;

[0711] R₇ is selected from the group consisting of C₁₋₃ alkyl, C₂₋₃ alkenyl, and H;

[0712] R₈ is selected from the group consisting of C₃₋₆ carbocycle and heterocycle;

[0713] R₉ is selected from the group consisting of H, CN, NO₂, C₁₋₆ alkyl, —OR, —S(O)₂R, —S(O)₂N(R)₂, C₂₋₆ alkenyl, C₃₋₆ carbocycle and heterocycle;

[0714] each R is independently selected from the group consisting of C₁₋₃ alkyl, C₂₋₃ alkenyl, and H;

[0715] each R′ is independently selected from the group consisting of C₁₋₁₈ alkyl, C₂₋₁₈ alkenyl, —R*YR″, —YR″, and H;

[0716] each R″ is independently selected from the group consisting of C₃₋₁₄ alkyl and C₃₋₁₄ alkenyl;

[0717] each R* is independently selected from the group consisting of C₁₋₁₂ alkyl and C₂₋₁₂ alkenyl;

[0718] each Y is independently a C₃₋₆ carbocycle;

[0719] each X is independently selected from the group consisting of F, Cl, Br, and I; and

[0720] m is selected from 5, 6, 7, 8, 9, 10, 11, 12, and 13,

[0721] or salts or stereoisomers thereof.

[0722] In another embodiments, another subset of compounds of Formula (I) includes those in which

[0723] R₁ is selected from the group consisting of C₅₋₃₀ alkyl, C₅₋₂₀ alkenyl, —R*YR″, —YR″, and —R″M′R′;

[0724] R₂ and R₃ are independently selected from the group consisting of H, C₁₋₁₄ alkyl, C₂₋₁₄ alkenyl, —R*YR″, —YR″, and —R*OR″, or R₂ and R₃, together with the atom to which they are attached, form a heterocycle or carbocycle;

[0725] R₄ is selected from the group consisting of a C₃₋₆ carbocycle, —(CH₂)ₙQ, —(CH₂)ₙCHQR, —CHQR, —CQ(R)₂, and unsubstituted C₁₋₆ alkyl, where Q is selected from a C₃₋₆ carbocycle, a 5- to 14-membered heteroaryl having one or more heteroatoms selected from N, O, and S, —OR, —O(CH₂)ₙN(R)₂, —C(O)OR, —OC(O)R, —CX₃, —CX₂H, —CXH₂, —CN, —C(O)N(R)₂, —N(R)C(O)R, —N(R)S(O)₂R, —N(R)C(O)N(R)₂, —N(R)C(S)N(R)₂, —CRN(R)₂C(O)OR, and a 5- to 14-membered heterocycloalkyl having one or more heteroatoms selected from N, O, and S which is substituted with one or more substituents selected from oxo (═O), OH, amino, and C₁₋₃ alkyl, and each n is independently selected from 1, 2, 3, 4, and 5;

[0726] each R₅ is independently selected from the group consisting of C₁₋₃ alkyl, C₂₋₃ alkenyl, and H;

[0727] each R₆ is independently selected from the group consisting of C₁₋₃ alkyl, C₂₋₃ alkenyl, and H;

[0728] M and M′ are independently selected from —C(O)O—, —OC(O)—, —C(O)N(R′)—, —N(R′)C(O)—, —C(O)—, —C(S)—, —C(S)S—, —SC(S)—, —CH(OH)—, —P(O)(OR′)O—, —S(O)₂—, an aryl group, and a heteroaryl group;

[0729] R₇ is selected from the group consisting of C₁₋₃ alkyl, C₂₋₃ alkenyl, and H;

[0730] each R is independently selected from the group consisting of C₁₋₃ alkyl, C₂₋₃ alkenyl, and H;

[0731] each R′ is independently selected from the group consisting of C₁₋₁₈ alkyl, C₂₋₁₈ alkenyl, —R*YR″, —YR″, and H;

[0732] each R″ is independently selected from the group consisting of C₃₋₁₄ alkyl and C₃₋₁₄ alkenyl;

[0733] each R* is independently selected from the group consisting of C₁₋₁₂ alkyl and C₂₋₁₂ alkenyl;

[0734] each Y is independently a C₃₋₆ carbocycle;

[0735] each X is independently selected from the group consisting of F, Cl, Br, and I; and

[0736] m is selected from 5, 6, 7, 8, 9, 10, 11, 12, and 13,

[0737] or salts or stereoisomers thereof.

[0738] In yet another embodiments, another subset of compounds of Formula (I) includes those in which

[0739] R₁ is selected from the group consisting of C₅₋₂₀ alkyl, C₅₋₂₀ alkenyl, —R*YR″, —YR″, and —R″M′R′;

[0740] R₂ and R₃ are independently selected from the group consisting of H, C₁₋₁₄ alkyl, C₂₋₁₄ alkenyl, —R*YR″, —YR″, and —R*OR″, or R₂ and R₃, together with the atom to which they are attached, form a heterocycle or carbocycle;

[0741] R₄ is selected from the group consisting of a C₃₋₆ carbocycle, —(CH₂)ₙQ, —(CH₂)ₙCHQR, —CHQR, —CQ(R)₂, and unsubstituted C₁₋₆ alkyl, where Q is selected from a C₃₋₆ carbocycle, a 5- to 14-membered heterocycle having one or more heteroatoms selected from N, O, and S, —OR, —O(CH₂)ₙN(R)₂, —C(O)OR, —OC(O)R, —CX₃, —CX₂H, —CXH₂, —CN, —C(O)N(R)₂, —N(R)C(O)R, —N(R)S(O)₂R, —N(R)C(O)N(R)₂, —N(R)C(S)N(R)₂, —CRN(R)₂C(O)OR, —N(R)R, —O(CH₂)ₙOR, —N(R)C(═NR₉)N(R)₂, —N(R)C(═CHR₉)N(R)₂, —OC(O)N(R)₂, —N(R)C(O)OR, —N(OR)C(O)R, —N(OR)S(O)₂R, —N(OR)C(O)OR, —N(OR)C(O)N(R)₂, —N(OR)C(S)N(R)₂, —N(OR)C(═NR₉)N(R)₂, —N(OR)C(═CHR₉)N(R)₂, —C(═NR₉)R, —C(O)N(R)OR, and —C(═NR₉)N(R)₂, and each n is independently selected from 1, 2, 3, 4, and 5; and when Q is a 5- to 14-membered heterocycle and (i) R₄ is —(CH₂)ₙQ in which n is 1 or 2, or (ii) R₄ is —(CH₂)ₙCHQR in which n is 1, or (iii) R₄ is —CHQR, and —CQ(R)₂, then Q is either a 5- to 14-membered heteroaryl or 8- to 14-membered heterocycloalkyl;

[0742] each R₅ is independently selected from the group consisting of C₁₋₃ alkyl, C₂₋₃ alkenyl, and H;

[0743] each R₆ is independently selected from the group consisting of C₁₋₃ alkyl, C₂₋₃ alkenyl, and H;

[0744] M and M′ are independently selected from —C(O)O—, —OC(O)—, —C(O)N(R′)—, —N(R′)C(O)—, —C(O)—, —C(S)—, —C(S)S—, —SC(S)—, —CH(OH)—, —P(O)(OR′)O—, —S(O)₂—, —S—S—, an aryl group, and a heteroaryl group;

[0745] R₇ is selected from the group consisting of C₁₋₃ alkyl, C₂₋₃ alkenyl, and H;

[0746] R₈ is selected from the group consisting of C₃₋₆ carbocycle and heterocycle;

[0747] R₉ is selected from the group consisting of H, CN, NO₂, C₁₋₆ alkyl, —OR, —S(O)₂R, —S(O)₂N(R)₂, C₂₋₆ alkenyl, C₃₋₆ carbocycle and heterocycle;

[0748] each R is independently selected from the group consisting of C₁₋₃ alkyl, C₂₋₃ alkenyl, and H;

[0749] each R′ is independently selected from the group consisting of C₁₋₁₈ alkyl, C₂₋₁₈ alkenyl, —R*YR″, —YR″, and H;

[0750] each R″ is independently selected from the group consisting of C₃₋₁₄ alkyl and C₃₋₁₄ alkenyl;

[0751] each R* is independently selected from the group consisting of C₁₋₁₂ alkyl and C₂₋₁₂ alkenyl;

[0752] each Y is independently a C₃₋₆ carbocycle;

[0753] each X is independently selected from the group consisting of F, Cl, Br, and I; and

[0754] m is selected from 5, 6, 7, 8, 9, 10, 11, 12, and 13,

[0755] or salts or stereoisomers thereof.

[0756] In yet another embodiments, another subset of compounds of Formula (I) includes those in which

[0757] R₁ is selected from the group consisting of C₅₋₂₀ alkyl, C₅₋₂₀ alkenyl, —R*YR″, —YR″, and —R″M′R′;

[0758] R₂ and R₃ are independently selected from the group consisting of H, C₁₋₁₄ alkyl, C₂₋₁₄ alkenyl, —R*YR″, —YR″, and —R*OR″, or R₂ and R₃, together with the atom to which they are attached, form a heterocycle or carbocycle;

[0759] R₄ is selected from the group consisting of a C₃₋₆ carbocycle, —(CH₂)ₙQ, —(CH₂)ₙCHQR, —CHQR, —CQ(R)₂, and unsubstituted C₁₋₆ alkyl, where Q is selected from a C₃₋₆ carbocycle, a 5- to 14-membered heterocycle having one or more heteroatoms selected from N, O, and S, —OR, —O(CH₂)ₙN(R)₂, —C(O)OR, —OC(O)R, —CX₃, —CX₂H, —CXH₂, —CN, —C(O)N(R)₂, —N(R)C(O)R, —N(R)S(O)₂R, —N(R)C(O)N(R)₂, —N(R)C(S)N(R)₂, —CRN(R)₂C(O)OR, and each n is independently selected from 1, 2, 3, 4, and 5; and when Q is a 5- to 14-membered heterocycle and (i) R₄ is —(CH₂)ₙQ in which n is 1 or 2, or (ii) R₄ is —(CH₂)ₙCHQR in which n is 1, or (iii) R₄ is —CHQR, and —CQ(R)₂, then Q is either a 5- to 14-membered heteroaryl or 8- to 14-membered heterocycloalkyl;

[0760] each R₅ is independently selected from the group consisting of C₁₋₃ alkyl, C₂₋₃ alkenyl, and H;

[0761] each R₆ is independently selected from the group consisting of C₁₋₃ alkyl, C₂₋₃ alkenyl, and H;

[0762] M and M′ are independently selected from —C(O)O—, —OC(O)—, —C(O)N(R′)—, —N(R′)C(O)—, —C(O)—, —C(S)—, —C(S)S—, —SC(S)—, —CH(OH)—, —P(O)(OR′)O—, —S(O)₂—, an aryl group, and a heteroaryl group;

[0763] R₇ is selected from the group consisting of C₁₋₃ alkyl, C₂₋₃ alkenyl, and H;

[0764] each R is independently selected from the group consisting of C₁₋₃ alkyl, C₂₋₃ alkenyl, and H;

[0765] each R′ is independently selected from the group consisting of C₁₋₁₈ alkyl, C₂₋₁₈ alkenyl, —R*YR″, —YR″, and H;

[0766] each R″ is independently selected from the group consisting of C₃₋₁₄ alkyl and C₃₋₁₄ alkenyl;

[0767] each R* is independently selected from the group consisting of C₁₋₁₂ alkyl and C₂₋₁₂ alkenyl;

[0768] each Y is independently a C₃₋₆ carbocycle;

[0769] each X is independently selected from the group consisting of F, Cl, Br, and I; and

[0770] m is selected from 5, 6, 7, 8, 9, 10, 11, 12, and 13,

[0771] or salts or stereoisomers thereof.

[0772] In still another embodiments, another subset of compounds of Formula (I) includes those in which

[0773] R₁ is selected from the group consisting of C₅₋₃₀ alkyl, C₅₋₂₀ alkenyl, —R*YR″, —YR″, and —R″M′R′;

[0774] R₂ and R₃ are independently selected from the group consisting of H, C₁₋₁₄ alkyl, C₂₋₁₄ alkenyl, —R*YR″, —YR″, and —R*OR″, or R₂ and R₃, together with the atom to which they are attached, form a heterocycle or carbocycle;

[0775] R₄ is selected from the group consisting of a C₃₋₆ carbocycle, —(CH₂)ₙQ, —(CH₂)ₙCHQR, —CHQR, —CQ(R)₂, and unsubstituted C₁₋₆ alkyl, where Q is selected from a C₃₋₆ carbocycle, a 5- to 14-membered heteroaryl having one or more heteroatoms selected from N, O, and S, —OR, —O(CH₂)ₙN(R)₂, —C(O)OR, —OC(O)R, —CX₃, —CX₂H, —CXH₂, —CN, —C(O)N(R)₂, —N(R)C(O)R, —N(R)S(O)₂R, —N(R)C(O)N(R)₂, —N(R)C(S)N(R)₂, —CRN(R)₂C(O)OR, —N(R)R₈, —O(CH₂)ₙOR, —N(R)C(═NR₉)N(R)₂, —N(R)C(═CHR₉)N(R)₂, —OC(O)N(R)₂, —N(R)C(O)OR, —N(OR)C(O)R, —N(OR)S(O)₂R, —N(OR)C(O)OR, —N(OR)C(O)N(R)₂, —N(OR)C(S)N(R)₂, —N(OR)C(═NR₉)N(R)₂, —N(OR)C(═CHR₉)N(R)₂, —C(═NR₉)R, —C(O)N(R)OR, and —C(═NR₉)N(R)₂, and each n is independently selected from 1, 2, 3, 4, and 5;

[0776] each R₅ is independently selected from the group consisting of C₁₋₃ alkyl, C₂₋₃ alkenyl, and H;

[0777] each R₆ is independently selected from the group consisting of C₁₋₃ alkyl, C₂₋₃ alkenyl, and H;

[0778] M and M′ are independently selected from —C(O)O—, —OC(O)—, —C(O)N(R′)—, —N(R′)C(O)—, —C(O)—, —C(S)—, —C(S)S—, —SC(S)—, —CH(OH)—, —P(O)(OR′)O—, —S(O)₂—, —S—S—, an aryl group, and a heteroaryl group;

[0779] R₇ is selected from the group consisting of C₁₋₃ alkyl, C₂₋₃ alkenyl, and H;

[0780] R₈ is selected from the group consisting of C₃₋₆ carbocycle and heterocycle;

[0781] R₉ is selected from the group consisting of H, CN, NO₂, C₁₋₆ alkyl, —OR, —S(O)₂R, —S(O)₂N(R)₂, C₂₋₆ alkenyl, C₃₋₆ carbocycle and heterocycle;

[0782] each R is independently selected from the group consisting of C₁₋₃ alkyl, C₂₋₃ alkenyl, and H;

[0783] each R′ is independently selected from the group consisting of C₁₋₁₈ alkyl, C₂₋₁₈ alkenyl, —R*YR″, —YR″, and H;

[0784] each R″ is independently selected from the group consisting of C₃₋₁₄ alkyl and C₃₋₁₄ alkenyl;

[0785] each R* is independently selected from the group consisting of C₁₋₁₂ alkyl and C₂₋₁₂ alkenyl;

[0786] each Y is independently a C₃₋₆ carbocycle;

[0787] each X is independently selected from the group consisting of F, Cl, Br, and I; and

[0788] m is selected from 5, 6, 7, 8, 9, 10, 11, 12, and 13,

[0789] or salts or stereoisomers thereof.

[0790] In still another embodiments, another subset of compounds of Formula (I) includes those in which

[0791] R₁ is selected from the group consisting of C₅₋₂₀ alkyl, C₅₋₂₀ alkenyl, —R*YR″, —YR″, and —R″M′R′;

[0792] R₂ and R₃ are independently selected from the group consisting of H, C₁₋₁₄ alkyl, C₂₋₁₄ alkenyl, —R*YR″, —YR″, and —R*OR″, or R₂ and R₃, together with the atom to which they are attached, form a heterocycle or carbocycle;

[0793] R₄ is selected from the group consisting of a C₃₋₆ carbocycle, —(CH₂)ₙQ, —(CH₂)ₙCHQR, —CHQR, —CQ(R)₂, and unsubstituted C₁₋₆ alkyl, where Q is selected from a C₃₋₆ carbocycle, a 5- to 14-membered heteroaryl having one or more heteroatoms selected from N, O, and S, —OR, —O(CH₂)ₙN(R)₂, —C(O)OR, —OC(O)R, —CX₃, —CX₂H, —CXH₂, —CN, —C(O)N(R)₂, —N(R)C(O)R, —N(R)S(O)₂R, —N(R)C(O)N(R)₂, —N(R)C(S)N(R)₂, —CRN(R)₂C(O)OR, and each n is independently selected from 1, 2, 3, 4, and 5;

[0794] each R₅ is independently selected from the group consisting of C₁₋₃ alkyl, C₂₋₃ alkenyl, and H;

[0795] each R₆ is independently selected from the group consisting of C₁₋₃ alkyl, C₂₋₃ alkenyl, and H;

[0796] M and M′ are independently selected from —C(O)O—, —OC(O)—, —C(O)N(R′)—, —N(R′)C(O)—, —C(O)—, —C(S)—, —C(S)S—, —SC(S)—, —CH(OH)—, —P(O)(OR′)O—, —S(O)₂—, an aryl group, and a heteroaryl group;

[0797] R₇ is selected from the group consisting of C₁₋₃ alkyl, C₂₋₃ alkenyl, and H;

[0798] each R is independently selected from the group consisting of C₁₋₃ alkyl, C₂₋₃ alkenyl, and H;

[0799] each R′ is independently selected from the group consisting of C₁₋₁₈ alkyl, C₂₋₁₈ alkenyl, —R*YR″, —YR″, and H;

[0800] each R″ is independently selected from the group consisting of C₃₋₁₄ alkyl and C₃₋₁₄ alkenyl;

[0801] each R* is independently selected from the group consisting of C₁₋₁₂ alkyl and C₂₋₁₂ alkenyl;

[0802] each Y is independently a C₃₋₆ carbocycle;

[0803] each X is independently selected from the group consisting of F, Cl, Br, and I; and

[0804] m is selected from 5, 6, 7, 8, 9, 10, 11, 12, and 13,

[0805] or salts or stereoisomers thereof.

[0806] In yet another embodiments, another subset of compounds of Formula (I) includes those in which

[0807] R₁ is selected from the group consisting of C₅₋₃₀ alkyl, C₅₋₂₀ alkenyl, —R*YR″, —YR″, and —R″M′R′;

[0808] R₂ and R₃ are independently selected from the group consisting of H, C₂₋₁₄ alkyl, C₂₋₁₄ alkenyl, —R*YR″, —YR″, and —R*OR″, or R₂ and R₃, together with the atom to which they are attached, form a heterocycle or carbocycle;

[0809] R₄ is —(CH₂)ₙQ or —(CH₂)ₙCHQR, where Q is —N(R)₂, and n is selected from 3, 4, and 5;

[0810] each R₅ is independently selected from the group consisting of C₁₋₃ alkyl, C₂₋₃ alkenyl, and H;

[0811] each R₆ is independently selected from the group consisting of C₁₋₃ alkyl, C₂₋₃ alkenyl, and H;

[0812] M and M′ are independently selected from —C(O)O—, —OC(O)—, —C(O)N(R′)—, —N(R′)C(O)—, —C(O)—, —C(S)—, —C(S)S—, —SC(S)—, —CH(OH)—, —P(O)(OR′)O—, —S(O)₂—, —S—S—, an aryl group, and a heteroaryl group;

[0813] R₇ is selected from the group consisting of C₁₋₃ alkyl, C₂₋₃ alkenyl, and H;

[0814] each R is independently selected from the group consisting of C₁₋₃ alkyl, C₂₋₃ alkenyl, and H;

[0815] each R′ is independently selected from the group consisting of C₁₋₁₈ alkyl, C₂₋₁₈ alkenyl, —R*YR″, —YR″, and H;

[0816] each R″ is independently selected from the group consisting of C₃₋₁₄ alkyl and C₃₋₁₄ alkenyl;

[0817] each R* is independently selected from the group consisting of C₁₋₁₂ alkyl and C₁₋₁₂ alkenyl;

[0818] each Y is independently a C₃₋₆ carbocycle;

[0819] each X is independently selected from the group consisting of F, Cl, Br, and I; and

[0820] m is selected from 5, 6, 7, 8, 9, 10, 11, 12, and 13,

[0821] or salts or stereoisomers thereof.

[0822] In yet another embodiments, another subset of compounds of Formula (I) includes those in which

[0823] R₁ is selected from the group consisting of C₅₋₂₀ alkyl, C₅₋₂₀ alkenyl, —R*YR″, —YR″, and —R″M′R′;

[0824] R₂ and R₃ are independently selected from the group consisting of H, C₂₋₁₄ alkyl, C₂₋₁₄ alkenyl, —R*YR″, —YR″, and —R*OR″, or R₂ and R₃, together with the atom to which they are attached, form a heterocycle or carbocycle;

[0825] R₄ is —(CH₂)ₙQ or —(CH₂)ₙCHQR, where Q is —N(R)₂, and n is selected from 3, 4, and 5;

[0826] each R₅ is independently selected from the group consisting of C₁₋₃ alkyl, C₂₋₃ alkenyl, and H;

[0827] each R₆ is independently selected from the group consisting of C₁₋₃ alkyl, C₂₋₃ alkenyl, and H;

[0828] M and M′ are independently selected from —C(O)O—, —OC(O)—, —C(O)N(R′)—, —N(R′)C(O)—, —C(O)—, —C(S)—, —C(S)S—, —SC(S)—, —CH(OH)—, —P(O)(OR′)O—, —S(O)₂—, an aryl group, and a heteroaryl group;

[0829] R₇ is selected from the group consisting of C₁₋₃ alkyl, C₂₋₃ alkenyl, and H;

[0830] each R is independently selected from the group consisting of C₁₋₃ alkyl, C₂₋₃ alkenyl, and H;

[0831] each R′ is independently selected from the group consisting of C₁₋₁₈ alkyl, C₂₋₁₈ alkenyl, —R*YR″, —YR″, and H;

[0832] each R″ is independently selected from the group consisting of C₃₋₁₄ alkyl and C₃₋₁₄ alkenyl;

[0833] each R* is independently selected from the group consisting of C₁₋₁₂ alkyl and C₁₋₁₂ alkenyl;

[0834] each Y is independently a C₃₋₆ carbocycle;

[0835] each X is independently selected from the group consisting of F, Cl, Br, and I; and

[0836] m is selected from 5, 6, 7, 8, 9, 10, 11, 12, and 13,

[0837] or salts or stereoisomers thereof.

[0838] In still other embodiments, another subset of compounds of Formula (I) includes those in which

[0839] R₁ is selected from the group consisting of C₅₋₃₀ alkyl, C₅₋₂₀ alkenyl, —R*YR″, —YR″, and —R″M′R′;

[0840] R₂ and R₃ are independently selected from the group consisting of C₁₋₁₄ alkyl, C₂₋₁₄ alkenyl, —R*YR″, —YR″, and —R*OR″, or R₂ and R₃, together with the atom to which they are attached, form a heterocycle or carbocycle;

[0841] R₄ is selected from the group consisting of —(CH₂)ₙQ, —(CH₂)ₙCHQR, —CHQR, and —CQ(R)₂, where Q is —N(R)₂, and n is selected from 1, 2, 3, 4, and 5;

[0842] each R₅ is independently selected from the group consisting of C₁₋₃ alkyl, C₂₋₃ alkenyl, and H;

[0843] each R₆ is independently selected from the group consisting of C₁₋₃ alkyl, C₂₋₃ alkenyl, and H;

[0844] M and M′ are independently selected from —C(O)O—, —OC(O)—, —C(O)N(R′)—, —N(R′)C(O)—, —C(O)—, —C(S)—, —C(S)S—, —SC(S)—, —CH(OH)—, —P(O)(OR′)O—, —S(O)₂—, —S—S—, an aryl group, and a heteroaryl group;

[0845] R₇ is selected from the group consisting of C₁₋₃ alkyl, C₂₋₃ alkenyl, and H;

[0846] each R is independently selected from the group consisting of C₁₋₃ alkyl, C₂₋₃ alkenyl, and H;

[0847] each R′ is independently selected from the group consisting of C₁₋₁₈ alkyl, C₂₋₁₈ alkenyl, —R*YR″, —YR″, and H;

[0848] each R″ is independently selected from the group consisting of C₃₋₁₄ alkyl and C₃₋₁₄ alkenyl;

[0849] each R* is independently selected from the group consisting of C₁₋₁₂ alkyl and C₁₋₁₂ alkenyl;

[0850] each Y is independently a C₃₋₆ carbocycle;

[0851] each X is independently selected from the group consisting of F, Cl, Br, and I; and

[0852] m is selected from 5, 6, 7, 8, 9, 10, 11, 12, and 13,

[0853] or salts or stereoisomers thereof.

[0854] In still other embodiments, another subset of compounds of Formula (I) includes those in which

[0855] R₁ is selected from the group consisting of C₅₋₂₀ alkyl, C₅₋₂₀ alkenyl, —R*YR″, —YR″, and —R″M′R′;

[0856] R₂ and R₃ are independently selected from the group consisting of C₁₋₁₄ alkyl, C₂₋₁₄ alkenyl, —R*YR″, —YR″, and —R*OR″, or R₂ and R₃, together with the atom to which they are attached, form a heterocycle or carbocycle;

[0857] R₄ is selected from the group consisting of —(CH₂)ₙQ, —(CH₂)ₙCHQR, —CHQR, and —CQ(R)₂, where Q is —N(R)₂, and n is selected from 1, 2, 3, 4, and 5;

[0858] each R₅ is independently selected from the group consisting of C₁₋₃ alkyl, C₂₋₃ alkenyl, and H;

[0859] each R₆ is independently selected from the group consisting of C₁₋₃ alkyl, C₂₋₃ alkenyl, and H;

[0860] M and M′ are independently selected from —C(O)O—, —OC(O)—, —C(O)N(R′)—, —N(R′)C(O)—, —C(O)—, —C(S)—, —C(S)S—, —SC(S)—, —CH(OH)—, —P(O)(OR′)O—, —S(O)₂—, an aryl group, and a heteroaryl group;

[0861] R₇ is selected from the group consisting of C₁₋₃ alkyl, C₂₋₃ alkenyl, and H;

[0862] each R is independently selected from the group consisting of C₁₋₃ alkyl, C₂₋₃ alkenyl, and H;

[0863] each R′ is independently selected from the group consisting of C₁₋₁₈ alkyl, C₂₋₁₈ alkenyl, —R*YR″, —YR″, and H;

[0864] each R″ is independently selected from the group consisting of C₃₋₁₄ alkyl and C₃₋₁₄ alkenyl;

[0865] each R* is independently selected from the group consisting of C₁₋₁₂ alkyl and C₁₋₁₂ alkenyl;

[0866] each Y is independently a C₃₋₆ carbocycle;

[0867] each X is independently selected from the group consisting of F, Cl, Br, and I; and

[0868] m is selected from 5, 6, 7, 8, 9, 10, 11, 12, and 13,

[0869] or salts or stereoisomers thereof.

[0870] In certain embodiments, a subset of compounds of Formula (I) includes those of Formula (IA):

[chemical structure]

[0871] or a salt or stereoisomer thereof, wherein 1 is selected from 1, 2, 3, 4, and 5; m is selected from 5, 6, 7, 8, and 9; M₁ is a bond or M′; R₄ is unsubstituted C₁₋₃ alkyl, or —(CH₂)ₙQ, in which Q is OH, —NHC(S)N(R)₂, —NHC(O)N(R)₂, —N(R)C(O)R, —N(R)S(O)₂R, —N(R)R₈, —NHC(═NR₉)N(R)₂, —NHC(═CHR₉)N(R)₂, —OC(O)N(R)₂, —N(R)C(O)OR, heteroaryl, or heterocycloalkyl; M and M′ are independently selected from —C(O)O—, —OC(O)—, —C(O)N(R′)—, —P(O)(OR′)O—, —S—S—, an aryl group, and a heteroaryl group; and

[0872] R₂ and R₃ are independently selected from the group consisting of H, C₁₋₁₄ alkyl, and C₂₋₁₄ alkenyl.

[0873] In some embodiments, a subset of compounds of Formula (I) includes those of Formula (IA), or a salt or stereoisomer thereof,

[0874] wherein

[0875] 1 is selected from 1, 2, 3, 4, and 5; m is selected from 5, 6, 7, 8, and 9;

[0876] M₁ is a bond or M′;

[0877] R₄ is unsubstituted C₁₋₃ alkyl, or —(CH₂)ₙQ, in which Q is OH, —NHC(S)N(R)₂, or —NHC(O)N(R)₂;

[0878] M and M′ are independently selected from —C(O)O—, —OC(O)—, —C(O)N(R′)—, —P(O)(OR′)O—, an aryl group, and a heteroaryl group; and

[0879] R₂ and R₃ are independently selected from the group consisting of H, C₁₋₁₄ alkyl, and C₂₋₁₄ alkenyl.

[0880] In certain embodiments, a subset of compounds of Formula (I) includes those of Formula (II):

[chemical structure]

[0881] or a salt or stereoisomer thereof, wherein 1 is selected from 1, 2, 3, 4, and 5; M₁ is a bond or M′; R₄ is unsubstituted C₁₋₃ alkyl, or —(CH₂)ₙQ, in which n is 2, 3, or 4, and Q is OH, —NHC(S)N(R)₂, —NHC(O)N(R)₂, —N(R)C(O)R, —N(R)S(O)₂R, —N(R)R, —NHC(═NR₉)N(R)₂, —NHC(═CHR₉)N(R)₂, —OC(O)N(R)₂, —N(R)C(O)OR, heteroaryl, or heterocycloalkyl; M and M′ are independently selected from —C(O)O—, —OC(O)—, —C(O)N(R′)—, —P(O)(OR′)O—, —S—S—, an aryl group, and a heteroaryl group; and

[0882] R₂ and R₃ are independently selected from the group consisting of H, C₁₋₁₄ alkyl, and C₂₋₁₄ alkenyl.

[0883] In some embodiments, a subset of compounds of Formula (I) includes those of Formula (II), or a salt or stereoisomer thereof, wherein

[0884] 1 is selected from 1, 2, 3, 4, and 5;

[0885] M₁ is a bond or M′;

[0886] R₄ is unsubstituted C₁₋₃ alkyl, or —(CH₂)ₙQ, in which n is 2, 3, or 4, and Q is OH, —NHC(S)N(R)₂, or —NHC(O)N(R)₂;

[0887] M and M′ are independently selected from —C(O)O—, —OC(O)—, —C(O)N(R′)—, —P(O)(OR′)O—, an aryl group, and a heteroaryl group; and

[0888] R₂ and R₃ are independently selected from the group consisting of H, C₁₋₁₄ alkyl, and C₂₋₁₄ alkenyl.

[0889] In some embodiments, the compound of formula (I) is of the formula (IIa),

[chemical structure]

[0890] or a salt thereof, wherein R₄ is as described above.

[0891] In some embodiments, the compound of formula (I) is of the formula (IIb),

[chemical structure]

[0892] or a salt thereof, wherein R₄ is as described above.

[0893] In some embodiments, the compound of formula (I) is of the formula (IIc),

[chemical structure]

[0894] or a salt thereof, wherein R₄ is as described above.

[0895] In some embodiments, the compound of formula (I) is of the formula (IIe):

[chemical structure]

[0896] or a salt thereof, wherein R₄ is as described above.

[0897] In some embodiments, the compound of formula (IIa), (IIb), (IIc), or (IIe) comprises an R₄ which is selected from —(CH₂)ₙQ and —(CH₂)ₙCHQR, wherein Q, R and n are as defined above.

[0898] In some embodiments, Q is selected from the group consisting of —OR, —OH, —O(CH₂)ₙN(R)₂, —OC(O)R, —CX₃, —CN, —N(R)C(O)R, —N(H)C(O)R, —N(R)S(O)₂R, —N(H)S(O)₂R, —N(R)C(O)N(R)₂, —N(H)C(O)N(R)₂, —N(H)C(O)N(H)(R), —N(R)C(S)N(R)₂, —N(H)C(S)N(R)₂, —N(H)C(S)N(H)(R), and a heterocycle, wherein R is as defined above. In some aspects, n is 1 or 2. In some embodiments, Q is OH, —NHC(S)N(R)₂, or —NHC(O)N(R)₂.

[0899] In some embodiments, the compound of formula (I) is of the formula (IId),

[chemical structure]

[0900] or a salt thereof, wherein R₂ and R₃ are independently selected from the group consisting of C₅₋₁₄ alkyl and C₅₋₁₄ alkenyl, n is selected from 2, 3, and 4, and R′, R″, R₅, R₆ and m are as defined above.

[0901] In some aspects of the compound of formula (IId), R₂ is C₈ alkyl. In some aspects of the compound of formula (IId), R₃ is C₅-C₉ alkyl. In some aspects of the compound of formula (IId), m is 5, 7, or 9. In some aspects of the compound of formula (IId), each R₅ is H. In some aspects of the compound of formula (IId), each R₆ is H.

[0902] In another aspect, the present application provides a lipid composition (e.g., a lipid nanoparticle (LNP)) comprising: (1) a compound having the formula (I); (2) optionally a helper lipid (e.g. a phospholipid); (3) optionally a structural lipid (e.g. a sterol); and (4) optionally a lipid conjugate (e.g. a PEG-lipid). In exemplary embodiments, the lipid composition (e.g., LNP) further comprises a polynucleotide encoding a polypeptide of interest, e.g., a polynucleotide encapsulated therein.

[0903] As used herein, the term “alkyl” or “alkyl group” means a linear or branched, saturated hydrocarbon including one or more carbon atoms (e.g., one, two, three, four, five, six, seven, eight, nine, ten, eleven, twelve, thirteen, fourteen, fifteen, sixteen, seventeen, eighteen, nineteen, twenty, or more carbon atoms).

[0904] The notation “C₁₋₁₄ alkyl” means a linear or branched, saturated hydrocarbon including 1-14 carbon atoms. An alkyl group can be optionally substituted.

[0905] As used herein, the term “alkenyl” or “alkenyl group” means a linear or branched hydrocarbon including two or more carbon atoms (e.g., two, three, four, five, six, seven, eight, nine, ten, eleven, twelve, thirteen, fourteen, fifteen, sixteen, seventeen, eighteen, nineteen, twenty, or more carbon atoms) and at least one double bond.

[0906] The notation “C₂₋₁₄ alkenyl” means a linear or branched hydrocarbon including 2-14 carbon atoms and at least one double bond. An alkenyl group can include one, two, three, four, or more double bonds. For example, C₁₈ alkenyl can include one or more double bonds. A C₁₈ alkenyl group including two double bonds can be a linoleyl group. An alkenyl group can be optionally substituted.

[0907] As used herein, the term “carbocycle” or “carbocyclic group” means a mono- or multi-cyclic system including one or more rings of carbon atoms. Rings can be three, four, five, six, seven, eight, nine, ten, eleven, twelve, thirteen, fourteen, or fifteen membered rings.

[0908] The notation “C₃₋₆ carbocycle” means a carbocycle including a single ring having 3-6 carbon atoms. Carbocycles can include one or more double bonds and can be aromatic (e.g., aryl groups). Examples of carbocycles include cyclopropyl, cyclopentyl, cyclohexyl, phenyl, naphthyl, and 1,2-dihydronaphthyl groups. Carbocycles can be optionally substituted.

[0909] As used herein, the term “heterocycle” or “heterocyclic group” means a mono- or multi-cyclic system including one or more rings, where at least one ring includes at least one heteroatom. Heteroatoms can be, for example, nitrogen, oxygen, or sulfur atoms. Rings can be three, four, five, six, seven, eight, nine, ten, eleven, or twelve membered rings. Heterocycles can include one or more double bonds and can be aromatic (e.g., heteroaryl groups). Examples of heterocycles include imidazolyl, imidazolidinyl, oxazolyl, oxazolidinyl, thiazolyl, thiazolidinyl, pyrazolidinyl, pyrazolyl, isoxazolidinyl, isoxazolyl, isothiazolidinyl, isothiazolyl, morpholinyl, pyrrolyl, pyrrolidinyl, furyl, tetrahydrofuryl, thiophenyl, pyridinyl, piperidinyl, quinolyl, and isoquinolyl groups. Heterocycles can be optionally substituted.

[0910] As used herein, a “biodegradable group” is a group that can facilitate faster metabolism of a lipid in a subject. A biodegradable group can be, but is not limited to, —C(O)O—, —OC(O)—, —C(O)N(R′)—, —N(R′)C(O)—, —C(O)—, —C(S)—, —C(S)S—, —SC(S)—, —CH(OH)—, —P(O)(OR′)O—, —S(O)₂—, an aryl group, and a heteroaryl group.

[0911] As used herein, an “aryl group” is a carbocyclic group including one or more aromatic rings. Examples of aryl groups include phenyl and naphthyl groups.

[0912] As used herein, a “heteroaryl group” is a heterocyclic group including one or more aromatic rings. Examples of heteroaryl groups include pyrrolyl, furyl, thiophenyl, imidazolyl, oxazolyl, and thiazolyl. Both aryl and heteroaryl groups can be optionally substituted. For example, M and M′ can be selected from the non-limiting group consisting of optionally substituted phenyl, oxazole, and thiazole. In the formulas herein, M and M′ can be independently selected from the list of biodegradable groups above.

[0913] Alkyl, alkenyl, and cyclyl (e.g., carbocyclyl and heterocyclyl) groups can be optionally substituted unless otherwise specified. Optional substituents can be selected from the group consisting of, but are not limited to, a halogen atom (e.g., a chloride, bromide, fluoride, or iodide group), a carboxylic acid (e.g., —C(O)OH), an alcohol (e.g., a hydroxyl, —OH), an ester (e.g., —C(O)OR or —OC(O)R), an aldehyde (e.g., —C(O)H), a carbonyl (e.g., —C(O)R, alternatively represented by C═O), an acyl halide (e.g., —C(O)X, in which X is a halide selected from bromide, fluoride, chloride, and iodide), a carbonate (e.g., —OC(O)OR), an alkoxy (e.g., —OR), an acetal (e.g., —C(OR)₂R″″, in which each OR are alkoxy groups that can be the same or different and R″″ is an alkyl or alkenyl group), a phosphate (e.g., P(O)₄³⁻), a thiol (e.g., —SH), a sulfoxide (e.g., —S(O)R), a sulfinic acid (e.g., —S(O)OH), a sulfonic acid (e.g., —S(O)₂OH), a thial (e.g., —C(S)H), a sulfate (e.g., S(O)₄²⁻), a sulfonyl (e.g., —S(O)₂—), an amide (e.g., —C(O)NR₂, or —N(R)C(O)R), an azido (e.g., —N₃), a nitro (e.g., —NO₂), a cyano (e.g., —CN), an isocyano (e.g., —NC), an acyloxy (e.g., —OC(O)R), an amino (e.g., —NR₂, —NRH, or —NH₂), a carbamoyl (e.g., —OC(O)NR₂, —OC(O)NRH, or —OC(O)NH₂), a sulfonamide (e.g., —S(O)₂NR₂, —S(O)₂NRH, —S(O)₂NH₂, —N(R)S(O)₂R, —N(H)S(O)₂R, —N(R)S(O)₂H, or —N(H)S(O)₂H), an alkyl group, an alkenyl group, and a cyclyl (e.g., carbocyclyl or heterocyclyl) group.

[0914] In any of the preceding, R is an alkyl or alkenyl group, as defined herein. In some embodiments, the substituent groups themselves can be further substituted with, for example, one, two, three, four, five, or six substituents as defined herein. For example, a C₁₋₆ alkyl group can be further substituted with one, two, three, four, five, or six substituents as described herein.

[0915] The compounds of any one of formulae (I), (IA), (II), (IIa), (IIb), (IIc), (IId), and (IIe) include one or more of the following features when applicable.

[0916] In some embodiments, R₄ is selected from the group consisting of a C₃₋₆ carbocycle, —(CH₂)ₙQ, —(CH₂)ₙCHQR, —CHQR, and —CQ(R)₂, where Q is selected from a C₃₋₆ carbocycle, 5- to 14-membered aromatic or non-aromatic heterocycle having one or more heteroatoms selected from N, O, S, and P, —OR, —O(CH₂)ₙN(R)₂, —C(O)OR, —OC(O)R, —CX₃, —CX₂H, —CXH₂, —CN, —N(R)₂, —C(O)N(R)₂, —N(R)C(O)R, —N(R)S(O)₂R, —N(R)C(O)N(R)₂, —N(R)C(S)N(R)₂, and —C(R)N(R)₂C(O)OR, and each n is independently selected from 1, 2, 3, 4, and 5.

[0917] In another embodiment, R₄ is selected from the group consisting of a C₃₋₆ carbocycle, —(CH₂)ₙQ, —(CH₂)ₙCHQR, —CHQR, and —CQ(R)₂, where Q is selected from a C₃₋₆ carbocycle, a 5- to 14-membered heteroaryl having one or more heteroatoms selected from N, O, and S, —OR, —O(CH₂)ₙN(R)₂, —C(O)OR, —OC(O)R, —CX₃, —CX₂H, —CXH₂, —CN, —C(O)N(R)₂, —N(R)C(O)R, —N(R)S(O)₂R, —N(R)C(O)N(R)₂, —N(R)C(S)N(R)₂, —C(R)N(R)₂C(O)OR, and a 5- to 14-membered heterocycloalkyl having one or more heteroatoms selected from N, O, and S which is substituted with one or more substituents selected from oxo (═O), OH, amino, and C₁₋₃ alkyl, and each n is independently selected from 1, 2, 3, 4, and 5.

[0918] In another embodiment, R₄ is selected from the group consisting of a C₃₋₆ carbocycle, —(CH₂)ₙQ, —(CH₂)ₙCHQR, —CHQR, and —CQ(R)₂, where Q is selected from a C₃₋₆ carbocycle, a 5- to 14-membered heterocycle having one or more heteroatoms selected from N, O, and S, —OR, —O(CH₂)ₙN(R)₂, —C(O)OR, —OC(O)R, —CX₃, —CX₂H, —CXH₂, —CN, —C(O)N(R)₂, —N(R)C(O)R, —N(R)S(O)₂R, —N(R)C(O)N(R)₂, —N(R)C(S)N(R)₂, —C(R)N(R)₂C(O)OR, and each n is independently selected from 1, 2, 3, 4, and 5; and when Q is a 5- to 14-membered heterocycle and (i) R₄ is —(CH₂)ₙQ in which n is 1 or 2, or (ii) R₄ is —(CH₂)ₙCHQR in which n is 1, or (iii) R₄ is —CHQR, and —CQ(R)₂, then Q is either a 5- to 14-membered heteroaryl or 8- to 14-membered heterocycloalkyl.

[0919] In another embodiment, R₄ is selected from the group consisting of a C₃₋₆ carbocycle, —(CH₂)ₙQ, —(CH₂)ₙCHQR, —CHQR, and —CQ(R)₂, where Q is selected from a C₃₋₆ carbocycle, a 5- to 14-membered heteroaryl having one or more heteroatoms selected from N, O, and S, —OR, —O(CH₂)ₙN(R)₂, —C(O)OR, —OC(O)R, —CX₃, —CX₂H, —CXH₂, —CN, —C(O)N(R)₂, —N(R)C(O)R, —N(R)S(O)₂R, —N(R)C(O)N(R)₂, —N(R)C(S)N(R)₂, —C(R)N(R)₂C(O)OR, and each n is independently selected from 1, 2, 3, 4, and 5.

[0920] In another embodiment, R₄ is unsubstituted C₁₋₄ alkyl, e.g., unsubstituted methyl.

[0921] In certain embodiments, the disclosure provides a compound having the Formula (I), wherein R₄ is —(CH₂)ₙQ or —(CH₂)ₙCHQR, where Q is —N(R)₂, and n is selected from 3, 4, and 5.

[0922] In certain embodiments, the disclosure provides a compound having the Formula (I), wherein R₄ is selected from the group consisting of —(CH₂)ₙQ, —(CH₂)ₙCHQR, —CHQR, and -CQ(R)₂, where Q is —N(R)₂, and n is selected from 1, 2, 3, 4, and 5.

[0923] In certain embodiments, the disclosure provides a compound having the Formula (I), wherein R₂ and R₃ are independently selected from the group consisting of C₂₋₁₄ alkyl, C₂₋₁₄ alkenyl, —R*YR″, —YR″, and —R*OR″, or R₂ and R₃, together with the atom to which they are attached, form a heterocycle or carbocycle, and R₄ is —(CH₂)ₙQ or —(CH₂)ₙCHQR, where Q is —N(R)₂, and n is selected from 3, 4, and 5.

[0924] In certain embodiments, R₂ and R₃ are independently selected from the group consisting of C₂₋₁₄ alkyl, C₂₋₁₄ alkenyl, —R*YR″, —YR″, and —R*OR″, or R₂ and R₃, together with the atom to which they are attached, form a heterocycle or carbocycle.

[0925] In some embodiments, R₁ is selected from the group consisting of C₅₋₂₀ alkyl and C₅₋₂₀ alkenyl.

[0926] In other embodiments, R₁ is selected from the group consisting of —R*YR″, —YR″, and —R″M′R′.

[0927] In certain embodiments, R₁ is selected from —R*YR″ and —YR″. In some embodiments, Y is a cyclopropyl group. In some embodiments, R* is C₈ alkyl or C₈ alkenyl. In certain embodiments, R″ is C₃₋₁₂ alkyl. For example, R″ can be C₃ alkyl. For example, R″ can be C₄₋₈ alkyl (e.g., C₄, C₅, C₆, C₇, or C₈ alkyl).

[0928] In some embodiments, R₁ is C₅₋₂₀ alkyl. In some embodiments, R₁ is C₆ alkyl. In some embodiments, R₁ is C₈ alkyl. In other embodiments, R₁ is C₉ alkyl. In certain embodiments, R₁ is C₁₄ alkyl. In other embodiments, R₁ is C₁₈ alkyl.

[0929] In some embodiments, R₁ is C₅₋₂₀ alkenyl. In certain embodiments, R₁ is C₁₈ alkenyl. In some embodiments, R₁ is linoleyl.

[0930] In certain embodiments, R₁ is branched (e.g., decan-2-yl, undecan-3-yl, dodecan-4-yl, tridecan-5-yl, tetradecan-6-yl, 2-methylundecan-3-yl, 2-methyldecan-2-yl, 3-methylundecan-3-yl, 4-methyldodecan-4-yl, or heptadeca-9-yl). In certain embodiments, R₁ is

[chemical structure]

[0931] In certain embodiments, R₁ is unsubstituted C₅₋₂₀ alkyl or C₅₋₂₀ alkenyl. In certain embodiments, R′ is substituted C₅₋₂₀ alkyl or C₅₋₂₀ alkenyl (e.g., substituted with a C₃₋₆ carbocycle such as 1-cyclopropylnonyl).

[0932] In other embodiments, R₁ is —R″M′R′.

[0933] In some embodiments, R′ is selected from —R*YR″ and —YR″. In some embodiments, Y is C₃₋₈ cycloalkyl. In some embodiments, Y is C₆₋₁₀ aryl. In some embodiments, Y is a cyclopropyl group. In some embodiments, Y is a cyclohexyl group. In certain embodiments, R* is C₁ alkyl.

[0934] In some embodiments, R″ is selected from the group consisting of C₃₋₁₂ alkyl and C₃₋₁₂ alkenyl. In some embodiments, R″ adjacent to Y is C₁ alkyl. In some embodiments, R″ adjacent to Y is C₄₋₉ alkyl (e.g., C₄, C₅, C₆, C₇ or C₈ or C₉ alkyl).

[0935] In some embodiments, R′ is selected from C₄ alkyl and C₄ alkenyl. In certain embodiments, R′ is selected from C₅ alkyl and C₅ alkenyl. In some embodiments, R′ is selected from C₆ alkyl and C₆ alkenyl. In some embodiments, R′ is selected from C₇ alkyl and C₇ alkenyl. In some embodiments, R′ is selected from C₉ alkyl and C₉ alkenyl.

[0936] In other embodiments, R′ is selected from C₁₁ alkyl and C₁₁ alkenyl. In other embodiments, R′ is selected from C₁₂ alkyl, C₁₂ alkenyl, C₁₃ alkyl, C₁₃ alkenyl, C₁₄ alkyl, C₁₄ alkenyl, C₁₅ alkyl, C₁₅ alkenyl, C₁₆ alkyl, C₁₆ alkenyl, C₁₇ alkyl, C₁₇ alkenyl, C₁₈ alkyl, and C₁₈ alkenyl. In certain embodiments, R′ is branched (e.g., decan-2-yl, undecan-3-yl, dodecan-4-yl, tridecan-5-yl, tetradecan-6-yl, 2-methylundecan-3-yl, 2-methyldecan-2-yl, 3-methylundecan-3-yl, 4-meth ldodecan-4-yl or heptadeca-9-yl). In certain embodiments, R′ is

[chemical structure]

[0937] In certain embodiments, R′ is unsubstituted C₁₋₁₈ alkyl. In certain embodiments, R′ is substituted C₁₋₁₈ alkyl (e.g., C₁₋₁₅ alkyl substituted with a C₃₋₆ carbocycle such as 1-cyclopropylnonyl).

[0938] In some embodiments, R″ is selected from the group consisting of C₃₋₁₄ alkyl and C₃₋₁₄ alkenyl. In some embodiments, R″ is C₃ alkyl, C₄ alkyl, C₅ alkyl, C₆ alkyl, C₇ alkyl, or C₈ alkyl. In some embodiments, R″ is C₉ alkyl, C₁₀ alkyl, C₁₁ alkyl, C₁₂ alkyl, C₁₃ alkyl, or C₁₄ alkyl.

[0939] In some embodiments, M′ is —C(O)O—. In some embodiments, M′ is —OC(O)—.

[0940] In other embodiments, M′ is an aryl group or heteroaryl group. For example, M′ can be selected from the group consisting of phenyl, oxazole, and thiazole.

[0941] In some embodiments, M is —C(O)O— In some embodiments, M is —OC(O)—. In some embodiments, M is —C(O)N(R′)—. In some embodiments, M is —P(O)(OR′)O—.

[0942] In other embodiments, M is an aryl group or heteroaryl group. For example, M can be selected from the group consisting of phenyl, oxazole, and thiazole.

[0943] In some embodiments, M is the same as M′. In other embodiments, M is different from M′.

[0944] In some embodiments, each R₅ is H. In certain such embodiments, each R₆ is also H.

[0945] In some embodiments, R₇ is H. In other embodiments, R₇ is C₁₋₃ alkyl (e.g., methyl, ethyl, propyl, or i-propyl).

[0946] In some embodiments, R₂ and R₃ are independently C₅₋₁₄ alkyl or C₅₋₁₄ alkenyl.

[0947] In some embodiments, R₂ and R₃ are the same. In some embodiments, R₂ and R₃ are C₈ alkyl. In certain embodiments, R₂ and R₃ are C₂ alkyl. In other embodiments, R₂ and R₃ are C₃ alkyl. In some embodiments, R₂ and R₃ are C₄ alkyl. In certain embodiments, R₂ and R₃ are C₅ alkyl. In other embodiments, R₂ and R₃ are C₆ alkyl. In some embodiments, R₂ and R₃ are C₇ alkyl.

[0948] In other embodiments, R₂ and R₃ are different. In certain embodiments, R₂ is C₈ alkyl. In some embodiments, R₃ is C₁₋₇ (e.g., C₁, C₂, C₃, C₄, C₅, C₆, or C₇ alkyl) or C₉ alkyl.

[0949] In some embodiments, R₇ and R₃ are H.

[0950] In certain embodiments, R₂ is H.

[0951] In some embodiments, m is 5, 7, or 9.

[0952] In some embodiments, R₄ is selected from —(CH₂)ₙQ and —(CH₂)ₙCHQR.

[0953] In some embodiments, Q is selected from the group consisting of —OR, —OH, —O(CH₂)ₙN(R)₂, —OC(O)R, —CX₃, —CN, —N(R)C(O)R, —N(H)C(O)R, —N(R)S(O)₂R, —N(H)S(O)₂R, —N(R)C(O)N(R)₂, —N(H)C(O)N(R)₂, —N(H)C(O)N(H)(R), —N(R)C(S)N(R)₂, —N(H)C(S)N(R)₂, —N(H)C(S)N(H)(R), —C(R)N(R)₂C(O)OR, a carbocycle, and a heterocycle.

[0954] In certain embodiments, Q is —OH.

[0955] In certain embodiments, Q is a substituted or unsubstituted 5- to 10-membered heteroaryl, e.g., Q is an imidazole, a pyrimidine, a purine, 2-amino-1,9-dihydro-6H-purin-6-one-9-yl (or guanin-9-yl), adenin-9-yl, cytosin-1-yl, or uracil-1-yl. In certain embodiments, Q is a substituted 5- to 14-membered heterocycloalkyl, e.g., substituted with one or more substituents selected from oxo (═O), OH, amino, and C₁₋₃ alkyl. For example, Q is 4-methylpiperazinyl, 4-(4-methoxybenzyl)piperazinyl, or isoindolin-2-yl-1,3-dione.

[0956] In certain embodiments, Q is an unsubstituted or substituted C₆₋₁₀ aryl (such as phenyl) or C₃₋₆ cycloalkyl.

[0957] In some embodiments, n is 1. In other embodiments, n is 2. In further embodiments, n is 3. In certain other embodiments, n is 4. For example, R₄ can be —(CH₂)₂OH. For example, R₄ can be —(CH₂)₃OH. For example, R₄ can be —(CH₂)₄OH. For example, R₄ can be benzyl. For example, R₄ can be 4-methoxybenzyl.

[0958] In some embodiments, R₄ is a C₃₋₆ carbocycle. In some embodiments, R₄ is a C₃₋₆ cycloalkyl. For example, R₄ can be cyclohexyl optionally substituted with e.g., OH, halo, C₁₋₆ alkyl, etc. For example, R₄ can be 2-hydroxycyclohexyl.

[0959] In some embodiments, R is H.

[0960] In some embodiments, R is unsubstituted C₁₋₃ alkyl or unsubstituted C₂₋₃ alkenyl. For example, R₄ can be —CH₂CH(OH)CH₃ or —CH₂CH(OH)CH₂CH₃.

[0961] In some embodiments, R is substituted C₁₋₃ alkyl, e.g., CH₂OH. For example, R₄ can be —CH₂CH(OH)CH₂OH.

[0962] In some embodiments, R₂ and R₃, together with the atom to which they are attached, form a heterocycle or carbocycle. In some embodiments, R₂ and R₃, together with the atom to which they are attached, form a 5- to 14-membered aromatic or non-aromatic heterocycle having one or more heteroatoms selected from N, O, S, and P. In some embodiments, R₂ and R₃, together with the atom to which they are attached, form an optionally substituted C₃₋₂₀ carbocycle (e.g., C₃₋₁₈ carbocycle, C₃₋₁₅ carbocycle, C₃₋₁₂ carbocycle, or C₃₋₁₀ carbocycle), either aromatic or non-aromatic. In some embodiments, R₂ and R₃, together with the atom to which they are attached, form a C₃₋₆ carbocycle. In other embodiments, R₂ and R₃, together with the atom to which they are attached, form a C₆ carbocycle, such as a cyclohexyl or phenyl group. In certain embodiments, the heterocycle or C₃₋₆ carbocycle is substituted with one or more alkyl groups (e.g., at the same ring atom or at adjacent or non-adjacent ring atoms). For example, R₂ and R₃, together with the atom to which they are attached, can form a cyclohexyl or phenyl group bearing one or more C₅ alkyl substitutions. In certain embodiments, the heterocycle or C₃₋₆ carbocycle formed by R₂ and R₃, is substituted with a carbocycle groups. For example, R₂ and R₃, together with the atom to which they are attached, can form a cyclohexyl or phenyl group that is substituted with cyclohexyl. In some embodiments, R₂ and R₃, together with the atom to which they are attached, form a C₇₋₁₅ carbocycle, such as a cycloheptyl, cyclopentadecanyl, or naphthyl group.

[0963] In some embodiments, R₄ is selected from —(CH₂)ₙQ and —(CH₂)ₙCHQR. In some embodiments, Q is selected from the group consisting of —OR, —OH, —O(CH₂)ₙN(R)₂, —OC(O)R, —CX₃, —CN, —N(R)C(O)R, —N(H)C(O)R, —N(R)S(O)₂R, —N(H)S(O)₂R, —N(R)C(O)N(R)₂, —N(H)C(O)N(R)₂, —N(H)C(O)N(H)(R), —N(R)C(S)N(R)₂, —N(H)C(S)N(R)₂, —N(H)C(S)N(H)(R), and a heterocycle. In other embodiments, Q is selected from the group consisting of an imidazole, a pyrimidine, and a purine.

[0964] In some embodiments, R₂ and R₃, together with the atom to which they are attached, form a heterocycle or carbocycle. In some embodiments, R₂ and R₃, together with the atom to which they are attached, form a C₃₋₆ carbocycle, such as a phenyl group. In certain embodiments, the heterocycle or C₃₋₆ carbocycle is substituted with one or more alkyl groups (e.g., at the same ring atom or at adjacent or non-adjacent ring atoms). For example, R₂ and R₃, together with the atom to which they are attached, can form a phenyl group bearing one or more C₅ alkyl substitutions.

[0965] In some embodiments, the pharmaceutical compositions of the present disclosure, the compound of formula (I) is selected from the group consisting of:

[chemical structure]

[chemical structure]

[chemical structure]

[chemical structure]

[chemical structure]

[chemical structure]

[chemical structure]

[chemical structure]

[chemical structure]

[chemical structure]

[chemical structure]

[chemical structure]

[chemical structure]

[chemical structure]

[chemical structure]

[chemical structure]

[chemical structure]

[chemical structure]

[chemical structure]

[chemical structure]

[chemical structure]

[chemical structure]

[chemical structure]

[chemical structure]

[chemical structure]

[chemical structure]

[chemical structure]

[chemical structure]

[chemical structure]

[chemical structure]

[chemical structure]

[chemical structure]

[chemical structure]

[chemical structure]

[chemical structure]

[chemical structure]

[chemical structure]

[chemical structure]

[chemical structure]

[chemical structure]

[chemical structure]

[chemical structure]

[chemical structure]

[chemical structure]

and salts and isomers thereof.

[0966] In other embodiments, the compound of Formula (I) is selected from the group consisting of Compound 1-Compound 147, or salt or stereoisomers thereof.

[0967] In some embodiments ionizable lipids including a central piperazine moiety are provided. The lipids described herein may be advantageously used in lipid nanoparticle compositions for the delivery of therapeutic and/or prophylactic agents to mammalian cells or organs. For example, the lipids described herein have little or no immunogenicity. For example, the lipid compounds disclosed herein have a lower immunogenicity as compared to a reference lipid (e.g., MC3, KC2, or DLinDMA). For example, a formulation comprising a lipid disclosed herein and a therapeutic or prophylactic agent has an increased therapeutic index as compared to a corresponding formulation which comprises a reference lipid (e.g., MC3, KC2, or DLinDMA) and the same therapeutic or prophylactic agent.

[0968] In some embodiments, the delivery agent comprises a lipid compound having the formula (III)

[chemical structure]

[0969] or salts or stereoisomers thereof, wherein

[0970] ring A is

[chemical structure]

[0971] t is 1 or 2;

[0972] A₁ and A₂ are each independently selected from CH or N;

[0973] Z is CH₂ or absent wherein when Z is CH₂, the dashed lines (1) and (2) each represent a single bond; and when Z is absent, the dashed lines (1) and (2) are both absent;

[0974] R₁, R₂, R₃, R₄, and R₅ are independently selected from the group consisting of C₅₋₂₀ alkyl, C₅₋₂₀ alkenyl, —R″MR′, —R*YR″, —YR″, and —R*OR″;

[0975] each M is independently selected from the group consisting of —C(O)O—, —OC(O)—, —OC(O)O—, —C(O)N(R′)—, —N(R′)C(O)—, —C(O)—, —C(S)—, —C(S)S—, —SC(S)—, —CH(OH)—, —P(O)(OR′)O—, —S(O)₂—, an aryl group, and a heteroaryl group;

[0976] X¹, X², and X³ are independently selected from the group consisting of a bond, —CH₂—, —(CH₂)₂—, —CHR—, —CHY—, —C(O)—, —C(O)O—, —OC(O)—, —C(O)—CH₂—, —CH₂—C(O)—, —C(O)O—CH₂—, —OC(O)—CH₂—, —CH₂—C(O)O—, —CH₂—OC(O)—, —CH(OH)—, —C(S)—, and —CH(SH—;

[0977] each Y is independently a C₃₋₆ carbocycle;

[0978] each R* is independently selected from the group consisting of C₁₋₁₂ alkyl and C₂₋₁₂ alkenyl;

[0979] each R is independently selected from the group consisting of C₁₋₃ alkyl and a C₃₋₆ carbocycle;

[0980] each R′ is independently selected from the group consisting of C₁₋₁₂ alkyl, C₂₋₁₂ alkenyl, and H; and

[0981] each R″ is independently selected from the group consisting of C₃₋₁₂ alkyl and C₃₋₁₂ alkenyl,

[0982] wherein when ring A is

[chemical structure]

then

[0983] i) at least one of X¹, X², and X³ is not —CH₂—; and/or

[0984] ii) at least one of R₁, R₂, R₃, R₄, and R₅ is —R″MR′.

[0985] In some embodiments, the compound is of any of formulae (IIIa1)-(IIIa6):

[chemical structure]

[0986] The compounds of Formula (III) or any of (IIIa1)-(IIIa6) include one or more of the following features when applicable.
[0987] In some embodiments, ring A is

[chemical structure]

[0988] In some embodiments, ring A is

[chemical structure]

[0989] In some embodiments, ring A is

[chemical structure]

[0990] In some embodiments, ring A is

[chemical structure]

[0991] In some embodiments, ring A is

[chemical structure]

[0992] In some embodiments, ring A is

[chemical structure]

[0993] wherein ring, in which the N atom is connected with X².
[0994] In some embodiments, Z is CH₂.
[0995] In some embodiments, Z is absent.
[0996] In some embodiments, at least one of A₁ and A₂ is N.
[0997] In some embodiments, each of A₁ and A₂ is N.
[0998] In some embodiments, each of A₁ and A₂ is CH.
[0999] In some embodiments, A₁ is N and A₂ is CH.
[1000] In some embodiments, A₁ is CH and A₂ is N.
[1001] In some embodiments, at least one of X¹, X², and X³ is not —CH₂—. For example, in certain embodiments, X¹ is not —CH₂—. In some embodiments, at least one of X¹, X², and X³ is —C(O)—.
[1002] In some embodiments, X² is —C(O)—, —C(O)O—, —OC(O)—, —C(O)—CH₂—, —CH₂—C(O)—, —C(O)O—CH₂—, —OC(O)—CH₂—, —CH₂—C(O)O—, or —CH₂—OC(O)—.
[1003] In some embodiments, X³ is —C(O)—, —C(O)O—, —OC(O)—, —C(O)—CH₂—, —CH₂—C(O)—, —C(O)O—CH₂—, —OC(O)—CH₂—, —CH₂—C(O)O—, or —CH₂—OC(O)—. In other embodiments, X³ is —CH₂—.
[1004] In some embodiments, X³ is a bond or —(CH₂)₂—.
[1005] In some embodiments, R₁ and R₂ are the same. In certain embodiments, R₁, R₂, and R₃ are the same. In some embodiments, R₄ and R₅ are the same. In certain embodiments, R₁, R₂, R₃, R₄, and R₅ are the same.

[1006] In some embodiments, at least one of R₁, R₂, R₃, R₄, and R₅ is —R″MR′. In some embodiments, at most one of R₁, R₂, R₃, R₄, and R₅ is —R″MR′. For example, at least one of R₁, R₂, and R₃ may be —R″MR′, and/or at least one of R₄ and R₅ is —R″MR′. In certain embodiments, at least one M is —C(O)O—. In some embodiments, each M is —C(O)O—. In some embodiments, at least one M is —OC(O)—. In some embodiments, each M is —OC(O)—. In some embodiments, at least one M is —OC(O)O—. In some embodiments, each M is —OC(O)O—. In some embodiments, at least one R″ is C₃ alkyl. In certain embodiments, each R″ is C₃ alkyl. In some embodiments, at least one R″ is C₅ alkyl. In certain embodiments, each R″ is C₅ alkyl. In some embodiments, at least one R″ is C₆ alkyl. In certain embodiments, each R″ is C₆ alkyl. In some embodiments, at least one R″ is C₇ alkyl. In certain embodiments, each R″ is C₇ alkyl. In some embodiments, at least one R′ is C₅ alkyl. In certain embodiments, each R′ is C₅ alkyl. In other embodiments, at least one R′ is C₁ alkyl. In certain embodiments, each R′ is C₁ alkyl. In some embodiments, at least one R′ is C₂ alkyl. In certain embodiments, each R′ is C₂ alkyl.

[1007] In some embodiments, at least one of R₁, R₂, R₃, R₄, and R₅ is C₁₂ alkyl. In certain embodiments, each of R₁, R₂, R₃, R₄, and R₅ are C₁₂ alkyl.

[1008] In certain embodiments, the compound is selected from the group consisting of:

[chemical structure]

[chemical structure]

[chemical structure]

[chemical structure]

[chemical structure]

[chemical structure]

[chemical structure]

[chemical structure]

[chemical structure]

[chemical structure]

[chemical structure]

[chemical structure]

[chemical structure]

[1009] In some embodiments, the delivery agent comprises Compound 236.

[1010] In some embodiments, the delivery agent comprises a compound having the formula (IV)

[chemical structure]

[1011] or salts or stereoisomer thereof, wherein

[1012] A₁ and A₂ are each independently selected from CH or N and at least one of A₁ and A₂ is N;

[1013] Z is CH₂ or absent wherein when Z is CH₂, the dashed lines (1) and (2) each represent a single bond; and when Z is absent, the dashed lines (1) and (2) are both absent;

[1014] R₁, R₂, R₃, R₄, and R₅ are independently selected from the group consisting of C₆₋₂₀ alkyl and C₆₋₂₀ alkenyl;

[1015] wherein when ring A is

[chemical structure]

then

[1016] i) R₁, R₂, R₃, R₄, and R₅ are the same, wherein R₁ is not C₁₂ alkyl, C₁₈ alkyl, or C₁₈ alkenyl;

[1017] ii) only one of R₁, R₂, R₃, R₄, and R₅ is selected from C₆₋₂₀ alkenyl;

[1018] iii) at least one of R₁, R₂, R₃, R₄, and R₅ have a different number of carbon atoms than at least one other of R₁, R₂, R₃, R₄, and R₅;

[1019] iv) R₁, R₂, and R₃ are selected from C₆₋₂₀ alkenyl, and R₄ and R₅ are selected from C₆₋₂₀ alkyl; or

[1020] v) R₁, R₂, and R₃ are selected from C₆₋₂₀ alkyl, and R₄ and R₅ are selected from C₆₋₂₀ alkenyl.

[1021] In some embodiments, the compound is of formula (IVa):

[chemical structure]

[1022] The compounds of Formula (IV) or (IVa) include one or more of the following features when applicable.

[1023] In some embodiments, Z is CH₂.

[1024] In some embodiments, Z is absent.

[1025] In some embodiments, at least one of A₁ and A₂ is N.

[1026] In some embodiments, each of A₁ and A₂ is N.

[1027] In some embodiments, each of A₁ and A₂ is CH.

[1028] In some embodiments, A₁ is N and A₂ is CH.

[1029] In some embodiments, A₁ is CH and A₂ is N.

[1030] In some embodiments, R₁, R₂, R₃, R₄, and R₅ are the same, and are not C₁₂ alkyl, C₁₈ alkyl, or C₁₈ alkenyl. In some embodiments, R₁, R₂, R₃, R₄, and R₅ are the same and are C₉ alkyl or C₁₄ alkyl.

[1031] In some embodiments, only one of R₁, R₂, R₃, R₄, and R₅ is selected from C₆₋₂₀ alkenyl. In certain such embodiments, R₁, R₂, R₃, R₄, and R₅ have the same number of carbon atoms. In some embodiments, R₄ is selected from C₅₋₂₀ alkenyl. For example, R₄ may be C₁₂ alkenyl or C₁₈ alkenyl.

[1032] In some embodiments, at least one of R₁, R₂, R₃, R₄, and R₅ have a different number of carbon atoms than at least one other of R₁, R₂, R₃, R₄, and R₅.

[1033] In certain embodiments, R₁, R₂, and R₃ are selected from C₆₋₂₀ alkenyl, and R₄ and R₅ are selected from C₆₋₂₀ alkyl. In other embodiments, R₁, R₂, and R₃ are selected from C₆₋₂₀ alkyl, and R₄ and R₅ are selected from C₆₋₂₀ alkenyl. In some embodiments, R₁, R₂, and R₃ have the same number of carbon atoms, and/or R₄ and R₅ have the same number of carbon atoms. For example, R₁, R₂, and R₃, or R₄ and R₅, may have 6, 8, 9, 12, 14, or 18 carbon atoms. In some embodiments, R₁, R₂, and R₃, or R₄ and R₅, are Cis alkenyl (e.g., linoleyl). In some embodiments, R₁, R₂, and R₃, or R₄ and R₅, are alkyl groups including 6, 8, 9, 12, or 14 carbon atoms.

[1034] In some embodiments, R₁ has a different number of carbon atoms than R₂, R₃, R₄, and R₅. In other embodiments, R₃ has a different number of carbon atoms than R₁, R₂, R₄, and R₅. In further embodiments, R₄ has a different number of carbon atoms than R₁, R₂, R₃, and R₅.

[1035] In some embodiments, the compound is selected from the group consisting of:

[chemical structure]

[chemical structure]

[chemical structure]

[chemical structure]

[1036] In other embodiments, the delivery agent comprises a compound having the formula (V)

[chemical structure]

[1037] or salts or stereoisomers thereof, in which

[1038] A₃ is CH or N;

[1039] A₄ is CH₂ or NH; and at least one of A₃ and A₄ is N or NH;

[1040] Z is CH₂ or absent wherein when Z is CH₂, the dashed lines (1) and (2) each represent a single bond; and when Z is absent, the dashed lines (1) and (2) are both absent;

[1041] R₁, R₂, and R₃ are independently selected from the group consisting of C₅₋₂₀ alkyl, C₅₋₂₀ alkenyl, —R″MR′, —R*YR″, —YR″, and —R*OR″;

[1042] each M is independently selected from —C(O)O—, —OC(O)—, —C(O)N(R′)—, —N(R′)C(O)—, —C(O)—, —C(S)—, —C(S)S—, —SC(S)—, —CH(OH)—, —P(O)(OR′)O—, —S(O)₂—, an aryl group, and a heteroaryl group;

[1043] X¹ and X² are independently selected from the group consisting of —CH₂—, —(CH₂)₂—, —CHR—, —CHY—, —C(O)—, —C(O)O—, —OC(O)—, —C(O)—CH₂—, —CH₂—C(O)—, —C(O)O—CH₂—, —OC(O)—CH₂—, —CH₂—C(O)O—, —CH₂—OC(O)—, —CH(OH)—, —C(S)—, and —CH(SH)—;

[1044] each Y is independently a C₃₋₆ carbocycle;

[1045] each R* is independently selected from the group consisting of C₁₋₁₂ alkyl and C₂₋₁₂ alkenyl;

[1046] each R is independently selected from the group consisting of C₁₋₃ alkyl and a C₃₋₆ carbocycle;

[1047] each R′ is independently selected from the group consisting of C₁₋₁₂ alkyl, C₂₋₁₂ alkenyl, and H; and

[1048] each R″ is independently selected from the group consisting of C₃₋₁₂ alkyl and C₃₋₁₂ alkenyl.

[1049] In some embodiments, the compound is of formula (Va):

[chemical structure]

[1050] The compounds of Formula (V) or (Va) include one or more of the following features when applicable.

[1051] In some embodiments, Z is CH₂.

[1052] In some embodiments, Z is absent.

[1053] In some embodiments, at least one of A₃ and A₄ is N or NH.

[1054] In some embodiments, A₃ is N and A₄ is NH.

[1055] In some embodiments, A₃ is N and A₄ is CH₂.

[1056] In some embodiments, A₃ is CH and A₄ is NH.

[1057] In some embodiments, at least one of X¹ and X² is not —CH₂—. For example, in certain embodiments, X¹ is not —CH₂—. In some embodiments, at least one of X¹ and X² is —C(O)—.

[1058] In some embodiments, X² is —C(O)—, —C(O)O—, —OC(O)—, —C(O)—CH₂—, —CH₂—C(O)—, —C(O)O—CH₂—, —OC(O)—CH₂—, —CH₂—C(O)O—, or —CH₂—OC(O)—.

[1059] In some embodiments, R₁, R₂, and R₃ are independently selected from the group consisting of C₅₋₂₀ alkyl and C₅₋₂₀ alkenyl. In some embodiments, R₁, R₂, and R₃ are the same. In certain embodiments, R₁, R₂, and R₃ are C₆, C₉, C₁₂, or C₁₄ alkyl. In other embodiments, R₁, R₂, and R₃ are C₁₈ alkenyl. For example, R₁, R₂, and R₃ may be linoleyl.

[1060] In some embodiments, the compound is selected from the group consisting of:

[chemical structure]

[1061] In other embodiments, the delivery agent comprises a compound having the formula (VI):

[chemical structure]

[1062] or salts or stereoisomers thereof, in which

[1063] A₆ and A₇ are each independently selected from CH or N, wherein at least one of A₆ and A₇ is N;

[1064] Z is CH₂ or absent wherein when Z is CH₂, the dashed lines (1) and (2) each represent a single bond; and when Z is absent, the dashed lines (1) and (2) are both absent;

[1065] X⁴ and X⁵ are independently selected from the group consisting of —CH₂—, —CH₂)₂—, —CHR—, —CHY—, —C(O)—, —C(O)O—, —OC(O)—, —C(O)—CH₂—, —CH₂—C(O)—, —C(O)O—CH₂—, —OC(O)—CH₂—, —CH₂—C(O)O—, —CH₂—OC(O)—, —CH(OH)—, —C(S)—, and —CH(SH)—;

[1066] R₁, R₂, R₃, R₄, and R₅ each are independently selected from the group consisting of C₅₋₂₀ alkyl, C₅₋₂₀ alkenyl, —R″MR′, —R*YR″, —YR″, and —R*OR″;

[1067] each M is independently selected from the group consisting of —C(O)O—, —OC(O)—, —C(O)N(R′)—, —N(R′)C(O)—, —C(O)—, —C(S)—, —C(S)S—, —SC(S)—, —CH(OH)—, —P(O)(OR′)O—, —S(O)₂— an aryl group, and a heteroaryl group;

[1068] each Y is independently a C₃₋₆ carbocycle;

[1069] each R* is independently selected from the group consisting of C₁₋₁₂ alkyl and C₂₋₁₂ alkenyl;

[1070] each R is independently selected from the group consisting of C₁₋₃ alkyl and a C₃₋₆ carbocycle;

[1071] each R′ is independently selected from the group consisting of C₁₋₁₂ alkyl, C₂₋₁₂ alkenyl, and H; and

[1072] each R″ is independently selected from the group consisting of C₃₋₁₂ alkyl and C₃₋₁₂ alkenyl.

[1073] In some embodiments, R₁, R₂, R₃, R₄, and R₅ each are independently selected from the group consisting of C₆₋₂₀ alkyl and C₆₋₂₀ alkenyl.

[1074] In some embodiments, R₁ and R₂ are the same. In certain embodiments, R₁, R₂, and R₃ are the same. In some embodiments, R₄ and R₅ are the same. In certain embodiments, R₁, R₂, R₃, R₄, and R₅ are the same.

[1075] In some embodiments, at least one of R₁, R₂, R₃, R₄, and R₅ is C₉₋₁₂ alkyl. In certain embodiments, each of R₁, R₂, R₃, R₄, and R₅ independently is C₉, C₁₂ or C₁₄ alkyl. In certain embodiments, each of R₁, R₂, R₃, R₄, and R₅ is C₉ alkyl.

[1076] In some embodiments, A₆ is N and A₇ is N. In some embodiments, A₆ is CH and A₇ is N.

[1077] In some embodiments, X⁴ is —CH₂— and X⁵ is —C(O)—. In some embodiments, X⁴ and X⁵ are —C(O)—.

[1078] In some embodiments, when A₆ is N and A₇ is N, at least one of X⁴ and X⁵ is not —CH₂—, e.g., at least one of X⁴ and X⁵ is —C(O)—. In some embodiments, when A₆ is N and A₇ is N, at least one of R₁, R₂, R₃, R₄, and R₅ is —R″MR′.

[1079] In some embodiments, at least one of R₁, R₂, R₃, R₄, and R₅ is not —R″MR′.

[1080] In some embodiments, the compound is

[chemical structure]

[1081] In other embodiments, the delivery agent comprises a compound having the formula:

[chemical structure]

[1082] Amine moieties of the lipid compounds disclosed herein can be protonated under certain conditions. For example, the central amine moiety of a lipid according to formula (I) is typically protonated (i.e., positively charged) at a pH below the pKa of the amino moiety and is substantially not charged at a pH above the pKa. Such lipids can be referred to ionizable amino lipids.

[1083] In one specific embodiment, the ionizable amino lipid is Compound 18. In another embodiment, the ionizable amino lipid is Compound 236.

[1084] In some embodiments, the amount the ionizable amino lipid, e.g., compound of formula (I) ranges from about 1 mol % to 99 mol % in the lipid composition.

[1085] In one embodiment, the amount of the ionizable amino lipid, e.g., compound of formula (I) is at least about 1, 2, 3, 4, 5, 6, 7, 8, 9, 10, 11, 12, 13, 14, 15, 16, 17, 18, 19, 20, 21, 22, 23, 24, 25, 26, 27, 28, 29, 30, 31, 32, 33, 34, 35, 36, 37, 38, 39, 40, 41, 42, 43, 44, 45, 46, 47, 48, 49, 50, 51, 52, 53, 54, 55, 56, 57, 58, 59, 60, 61, 62, 63, 64, 65, 66, 67, 68, 69, 70, 71, 72, 73, 74, 75, 76, 77, 78, 79, 80, 81, 82, 83, 84, 85, 86, 87, 88, 89, 90, 91, 92, 93, 94, 95, 96, 97, 98, or 99 mol % in the lipid composition.

[1086] In one embodiment, the amount of the ionizable amino lipid, e.g., the compound of formula (I) ranges from about 30 mol % to about 70 mol %, from about 35 mol % to about 65 mol %, from about 40 mol % to about 60 mol %, and from about 45 mol % to about 55 mol % in the lipid composition.

[1087] In one specific embodiment, the amount of the ionizable amino lipid, e.g., compound of formula (I) is about 50 mol % in the lipid composition.

[1088] In addition to the ionizable amino lipid disclosed herein, e.g., compound of formula (I), the lipid composition of the pharmaceutical compositions disclosed herein can comprise additional components such as phospholipids, structural lipids, PEG-lipids, and any combination thereof.

[1089] b. Phospholipids

[1090] The lipid composition of the pharmaceutical composition disclosed herein can comprise one or more phospholipids, for example, one or more saturated or (poly)unsaturated phospholipids or a combination thereof. In general, phospholipids comprise a phospholipid moiety and one or more fatty acid moieties.

[1091] A phospholipid moiety can be selected, for example, from the non-limiting group consisting of phosphatidyl choline, phosphatidyl ethanolamine, phosphatidyl glycerol, phosphatidyl serine, phosphatidic acid, 2-lysophosphatidyl choline, and a sphingomyelin.

[1092] A fatty acid moiety can be selected, for example, from the non-limiting group consisting of lauric acid, myristic acid, myristoleic acid, palmitic acid, palmitoleic acid, stearic acid, oleic acid, linoleic acid, alpha-linolenic acid, erucic acid, phytanoic acid, arachidic acid, arachidonic acid, eicosapentaenoic acid, behenic acid, docosapentaenoic acid, and docosahexaenoic acid.

[1093] Particular phospholipids can facilitate fusion to a membrane. For example, a cationic phospholipid can interact with one or more negatively charged phospholipids of a membrane (e.g., a cellular or intracellular membrane). Fusion of a phospholipid to a membrane can allow one or more elements (e.g., a therapeutic agent) of a lipid-containing composition (e.g., LNPs) to pass through the membrane permitting, e.g., delivery of the one or more elements to a target tissue.

[1094] Non-natural phospholipid species including natural species with modifications and substitutions including branching, oxidation, cyclization, and alkynes are also contemplated. For example, a phospholipid can be functionalized with or cross-linked to one or more alkynes (e.g., an alkenyl group in which one or more double bonds is replaced with a triple bond). Under appropriate reaction conditions, an alkyne group can undergo a copper-catalyzed cycloaddition upon exposure to an azide. Such reactions can be useful in functionalizing a lipid bilayer of a nanoparticle composition to facilitate membrane permeation or cellular recognition or in conjugating a nanoparticle composition to a useful component such as a targeting or imaging moiety (e.g., a dye).

[1095] Phospholipids include, but are not limited to, glycerophospholipids such as phosphatidylcholines, phosphatidylethanolamines, phosphatidylserines, phosphatidylinositols, phosphatidy glycerols, and phosphatidic acids. Phospholipids also include phosphosphingolipid, such as sphingomyelin.

[1096] Examples of phospholipids include, but are not limited to, the following:

[chemical structure]

[chemical structure]

[chemical structure]

[1097] In certain embodiments, a phospholipid useful or potentially useful in the present invention is an analog or variant of DSPC (1,2-dioctadecanoyl-sn-glycero-3-phosphocholine). In certain embodiments, a phospholipid useful or potentially useful in the present invention is a compound of Formula (IX):

[chemical structure]

[1098] (or a salt thereof, wherein:

[1099] each R¹ is independently optionally substituted alkyl; or optionally two R¹ are joined together with the intervening atoms to form optionally substituted monocyclic carbocyclyl or optionally substituted monocyclic heterocyclyl; or optionally three R¹ are joined together with the intervening atoms to form optionally substituted bicyclic carbocyclyl or optionally substitute bicyclic heterocyclyl;

[1100] n is 1, 2, 3, 4, 5, 6, 7, 8, 9, or 10;

[1101] m is 0, 1, 2, 3, 4, 5, 6, 7, 8, 9, or 10;

[1102] A is of the formula:

[chemical structure]

[1103] each instance of L² is independently a bond or optionally substituted C₁₋₆ alkylene, wherein one methylene unit of the optionally substituted C₁₋₆ alkylene is optionally replaced with —O—, —N(R^{N})—, —S—, —C(O)—, —C(O)N(R^{N})—, —NR^{N}C(O)—, —C(O)O—, —OC(O)—, —OC(O)O—, —OC(O)N(R^{N})—, —NR^{N}C(O)O—, or —NR^{N}C(O)N(R^{N})—;

[1104] each instance of R² is independently optionally substituted C₁₋₃₀ alkyl, optionally substituted C₁₋₃₀ alkenyl, or optionally substituted C₁₋₃₀ alkynyl; optionally wherein one or more methylene units of R² are independently replaced with optionally substituted carbocyclylene, optionally substituted heterocyclylene, optionally substituted arylene, optionally substituted heteroarylene, —N(R^{N})—, —O—, —S—, —C(O)—, —C(O)N(R^{N})—, —NR^{N}C(O)—, —NR^{N}C(O)N(R^{N})—, —C(O)O—, —OC(O)—, —OC(O)O—, —OC(O)N(R^{N})—, —NR^{N}C(O)O—, —C(O)S—, —SC(O)—, —C(═NR^{N})—, —C(═NR^{N})N(R^{N})—, —NRNC(═NR^{N})—, —NRNC(═NR^{N})N(R^{N})—, —C(S)—, —C(S)N(R^{N})—, —NR^{N}C(S)—, —NR^{N}C(S)N(R^{N})—, —S(O)—, —OS(O)—, —S(O)O—, —OS(O)O—, —OS(O)₂—, —S(O)₂O—, —OS(O)₂O—, —N(R^{N})S(O)—, —S(O)N(R^{N})—, —N(R^{N})S(O)N(R^{N})—, —OS(O)N(R^{N})—, —N(R^{N})S(O)O—, —S(O)₂—, —N(R^{N})S(O)₂—, —S(O)₂N(R^{N})—, —N(R^{N})S(O)₂N(R^{N})—, —OS(O)₂N(R^{N})—, or —N(R^{N})S(O)₂O—;

[1105] each instance of R^{N} is independently hydrogen, optionally substituted alkyl, or a nitrogen protecting group;

[1106] Ring B is optionally substituted carbocyclyl, optionally substituted heterocyclyl, optionally substituted aryl, or optionally substituted heteroaryl; and

[1107] p is 1 or 2;

[1108] provided that the compound is not of the formula:

[chemical structure]

[1109] wherein each instance of R² is independently unsubstituted alkyl, unsubstituted alkenyl, or unsubstituted alkynyl.

[1110] i) Phospholipid Head Modifications

[1111] In certain embodiments, a phospholipid useful or potentially useful in the present invention comprises a modified phospholipid head (e.g., a modified choline group). In certain embodiments, a phospholipid with a modified head is DSPC, or analog thereof, with a modified quaternary amine. For example, in embodiments of Formula (IX), at least one of R¹ is not methyl. In certain embodiments, at least one of R¹ is not hydrogen or methyl. In certain embodiments, the compound of Formula (IX) is of one of the following formulae:

[chemical structure]

[1112] or a salt thereof, wherein:

[1113] each t is independently 1, 2, 3, 4, 5, 6, 7, 8, 9, or 10;

[1114] each u is independently 0, 1, 2, 3, 4, 5, 6, 7, 8, 9, or 10; and

[1115] each v is independently 1, 2, or 3.

[1116] In certain embodiments, the compound of Formula (IX) is of one of the following formulae:

[chemical structure]

[1117] or a salt thereof.

[1118] In certain embodiments, a compound of Formula (IX) is one of the following:

[chemical structure]

[chemical structure]

[1119] or a salt thereof.

[1120] In certain embodiments, a compound of Formula (IX) is of Formula (IX-a):

[chemical structure]

[1121] or a salt thereof.

[1122] In certain embodiments, phospholipids useful or potentially useful in the present invention comprise a modified core. In certain embodiments, a phospholipid with a modified core described herein is DSPC, or analog thereof, with a modified core structure. For example, in certain embodiments of Formula (IX-a), group A is not of the following formula:

[chemical structure]

[1123] In certain embodiments, the compound of Formula (IX-a) is of one of the following formulae:

[chemical structure]

[1124] or a salt thereof.

[1125] In certain embodiments, a compound of Formula (IX) is one of the following:

[chemical structure]

[1126] or salts thereof.

[1127] In certain embodiments, a phospholipid useful or potentially useful in the present invention comprises a cyclic moiety in place of the glyceride moiety. In certain embodiments, a phospholipid useful in the present invention is DSPC (1,2-dioctadecanoyl-sn-glycero-3-phosphocholine), or analog thereof, with a cyclic moiety in place of the glyceride moiety. In certain embodiments, the compound of Formula (IX) is of Formula (IX-b):

[chemical structure]

[1128] or a salt thereof.

[1129] In certain embodiments, the compound of Formula (IX-b) is of Formula (IX-b-1):

[chemical structure]

[1130] or a salt thereof, wherein:

[1131] w is 0, 1, 2, or 3.

[1132] In certain embodiments, the compound of Formula (IX-b) is of Formula (IX-b-2):

[chemical structure]

[1133] or a salt thereof.

[1134] In certain embodiments, the compound of Formula (IX-b) is of Formula (IX-b-3):

[chemical structure]

[1135] or a salt thereof.

[1136] In certain embodiments, the compound of Formula (IX-b) is of Formula (IX-b-4):

[chemical structure]

[1137] or a salt thereof.

[1138] In certain embodiments, the compound of Formula (IX-b) is one of the following:

[chemical structure]

[1139] or salts thereof.

[1140] (ii) Phospholipid Tail Modifications

[1141] In certain embodiments, a phospholipid useful or potentially useful in the present invention comprises a modified tail. In certain embodiments, a phospholipid useful or potentially useful in the present invention is DSPC (1,2-dioctadecanoyl-sn-glycero-3-phosphocholine), or analog thereof, with a modified tail. As described herein, a “modified tail” may be a tail with shorter or longer aliphatic chains, aliphatic chains with branching introduced, aliphatic chains with substituents introduced, aliphatic chains wherein one or more methylenes are replaced by cyclic or heteroatom groups, or any combination thereof. For example, in certain embodiments, the compound of (IX) is of Formula (IX-a), or a salt thereof, wherein at least one instance of R² is each instance of R² is optionally substituted C₁₋₃₀ alkyl, wherein one or more methylene units of R² are independently replaced with optionally substituted carbocyclylene, optionally substituted heterocyclylene, optionally substituted arylene, optionally substituted heteroarylene, —N(R^{N})—, —O—, —S—, —C(O)—, —C(O)N(R^{N})—, —NR^{N}C(O)—, —NR^{N}C(O)N(R^{N})—, —C(O)O—, —OC(O)—, —OC(O)O—, —OC(O)N(R^{N})—, —NR^{N}C(O)O—, —C(O)S—, —SC(O)—, —C(═NR^{N})—, —C(═NR^{N})N(R^{N})—, —NR^{N}C(═NR^{N})—, —NR^{N}C(═NR^{N})N(R^{N})—, —C(S)—, —C(S)N(R^{N})—, —NR^{N}C(S)—, —NR^{N}C(S)N(R^{N})—, —S(O)—, —OS(O)—, —S(O)O—, —OS(O)O—, —OS(O)₂—, —S(O)₂O—, —OS(O)₂O—, —N(R^{N})S(O)—, —S(O)N(R^{N})—, —N(R^{N})S(O)N(R^{N})—, —OS(O)N(R^{N})—, —N(R^{N})S(O)O—, —S(O)₂—, —N(R^{N})S(O)₂—, —S(O)₂N(R^{N})—, —N(R^{N})S(O)₂N(R^{N})—, —OS(O)₂N(R^{N})—, or —N(R^{N})S(O)₂O—.

[1142] In certain embodiments, the compound of Formula (IX) is of Formula (IX-c):

[chemical structure]

[1143] or a salt thereof, wherein:

[1144] each x is independently an integer between 0-30, inclusive; and

[1145] each instance is G is independently selected from the group consisting of optionally substituted carbocyclylene, optionally substituted heterocyclylene, optionally substituted arylene, optionally substituted heteroarylene, —N(R^{N})—, —O—, —S—, —C(O)—, —C(O)N(R^{N})—, —NR^{N}C(O)—, —NR^{N}C(O)N(R^{N})—, —C(O)O—, —OC(O)—, —OC(O)O—, —OC(O)N(R^{N})—, —NR^{N}C(O)O—, —C(O)S—, —SC(O)—, —C(═NR^{N})—, —C(═NR)N(R^{N})—, —NR^{N}C(═NR^{N})—, —NR^{N}C(═NR^{N})N(R^{N})—, —C(S)—, —C(S)N(R^{N})—, —NR^{N}C(S)—, —NR^{N}C(S)N(R^{N})—, —S(O)—, —OS(O)—, —S(O)O—, —OS(O)O—, —OS(O)₂—, —S(O)₂O—, —OS(O)₂O—, —N(R^{N})S(O)—, —S(O)N(R^{N})—, —N(R^{N})S(O)N(R^{N})—, —OS(O)N(R^{N})—, —N(R^{N})S(O)O—, —S(O)₂—, —N(R^{N})S(O)₂—, —S(O)₂N(R^{N})—, —N(R^{N})S(O)₂N(R^{N})—, —OS(O)₂N(R^{N})—, or —N(R^{N})S(O)₂O—. Each possibility represents a separate embodiment of the present invention.

[1146] In certain embodiments, the compound of Formula (IX-c) is of Formula (IX-c-1):

[chemical structure]

[1147] or salt thereof, wherein:

[1148] each instance of v is independently 1, 2, or 3.

[1149] In certain embodiments, the compound of Formula (IX-c) is of Formula (IX-c-2):

[chemical structure]

[1150] or a salt thereof.

[1151] In certain embodiments, the compound of Formula (IX-c) is of the following formula:

[chemical structure]

[1152] or a salt thereof.

[1153] In certain embodiments, the compound of Formula (IX-c) is the following:

[chemical structure]

[1154] or a salt thereof.

[1155] In certain embodiments, the compound of Formula (IX-c) is of Formula (IX-c-3):

[chemical structure]

[1156] or a salt thereof.

[1157] In certain embodiments, the compound of Formula (IX-c) is of the following formulae:

[chemical structure]

[1158] or a salt thereof.

[1159] In certain embodiments, the compound of Formula (IX-c) is the following:

[chemical structure]

[1160] or a salt thereof.

[1161] In certain embodiments, a phospholipid useful or potentially useful in the present invention comprises a modified phosphocholine moiety, wherein the alkyl chain linking the quaternary amine to the phosphoryl group is not ethylene (e.g., n is not 2). Therefore, in certain embodiments, a phospholipid useful or potentially useful in the present invention is a compound of Formula (IX), wherein n is 1, 3, 4, 5, 6, 7, 8, 9, or 10. For example, in certain embodiments, a compound of Formula (IX) is of one of the following formulae:

[chemical structure]

[1162] or a salt thereof.

[1163] In certain embodiments, a compound of Formula (IX) is one of the following:

[chemical structure]

[chemical structure]

[chemical structure]

[1164] or salts thereof.

[1165] c. Alternative Lipids

[1166] In certain embodiments, an alternative lipid is used in place of a phospholipid of the invention. Non-limiting examples of such alternative lipids include the following:

[chemical structure]

[chemical structure]

[1167] d. Structural Lipids

[1168] The lipid composition of a pharmaceutical composition disclosed herein can comprise one or more structural lipids. As used herein, the term “structural lipid” refers to sterols and also to lipids containing sterol moieties.

[1169] Incorporation of structural lipids in the lipid nanoparticle may help mitigate aggregation of other lipids in the particle. Structural lipids can be selected from the group including but not limited to, cholesterol, fecosterol, sitosterol, ergosterol, campesterol, stigmasterol, brassicasterol, tomatidine, tomatine, ursolic acid, alpha-tocopherol, hopanoids, phytosterols, steroids, and mixtures thereof. In some embodiments, the structural lipid is a sterol. As defined herein, “sterols” are a subgroup of steroids consisting of steroid alcohols. In certain embodiments, the structural lipid is a steroid. In certain embodiments, the structural lipid is cholesterol. In certain embodiments, the structural lipid is an analog of cholesterol. In certain embodiments, the structural lipid is alpha-tocopherol. Examples of structural lipids include, but are not limited to, the following:

[chemical structure]

[1170] In one embodiment, the amount of the structural lipid (e.g., an sterol such as cholesterol) in the lipid composition of a pharmaceutical composition disclosed herein ranges from about 20 mol % to about 60 mol %, from about 25 mol % to about 55 mol %, from about 30 mol % to about 50 mol %, or from about 35 mol % to about 45 mol %.

[1171] In one embodiment, the amount of the structural lipid (e.g., an sterol such as cholesterol) in the lipid composition disclosed herein ranges from about 25 mol % to about 30 mol %, from about 30 mol % to about 35 mol %, or from about 35 mol % to about 40 mol %.

[1172] In one embodiment, the amount of the structural lipid (e.g., a sterol such as cholesterol) in the lipid composition disclosed herein is about 24 mol %, about 29 mol %, about 34 mol %, or about 39 mol %.

[1173] In some embodiments, the amount of the structural lipid (e.g., an sterol such as cholesterol) in the lipid composition disclosed herein is at least about 20, 21, 22, 23, 24, 25, 26, 27, 28, 29, 30, 31, 32, 33, 34, 35, 36, 37, 38, 39, 40, 41, 42, 43, 44, 45, 46, 47, 48, 49, 50, 51, 52, 53, 54, 55, 56, 57, 58, 59, or 60 mol %.

[1174] e. Polyethylene Glycol (PEG)-Lipids

[1175] The lipid composition of a pharmaceutical composition disclosed herein can comprise one or more a polyethylene glycol (PEG) lipid.

[1176] As used herein, the term “PEG-lipid” refers to polyethylene glycol (PEG)-modified lipids. Non-limiting examples of PEG-lipids include PEG-modified phosphatidylethanolamine and phosphatidic acid, PEG-ceramide conjugates (e.g., PEG-CerC14 or PEG-CerC20), PEG-modified dialkylamines and PEG-modified 1,2-diacyloxypropan-3-amines. Such lipids are also referred to as PEGylated lipids. For example, a PEG lipid can be PEG-c-DOMG, PEG-DMG, PEG-DLPE, PEG-DMPE, PEG-DPPC, or a PEG-DSPE lipid.

[1177] In some embodiments, the PEG-lipid includes, but not limited to 1,2-dimyristoyl-sn-glycerol methoxypolyethylene glycol (PEG-DMG), 1,2-distearoyl-sn-glycero-3-phosphoethanolamine-N-[amino(polyethylene glycol)] (PEG-DSPE), PEG-disteryl glycerol (PEG-DSG), PEG-dipalmetoleyl, PEG-dioleyl, PEG-distearyl, PEG-diacylglycamide (PEG-DAG), PEG-dipalmitoyl phosphatidylethanolamine (PEG-DPPE), or PEG-1,2-dimyristyloxlpropyl-3-amine (PEG-c-DMA).

[1178] In one embodiment, the PEG-lipid is selected from the group consisting of a PEG-modified phosphatidylethanolamine, a PEG-modified phosphatidic acid, a PEG-modified ceramide, a PEG-modified dialkylamine, a PEG-modified diacylglycerol, a PEG-modified dialkylglycerol, and mixtures thereof.

[1179] In some embodiments, the lipid moiety of the PEG-lipids includes those having lengths of from about C₁₄ to about C₂₂, preferably from about C₁₄ to about C₁₆. In some embodiments, a PEG moiety, for example an mPEG-NH₂, has a size of about 1000, 2000, 5000, 10,000, 15,000 or 20,000 daltons. In one embodiment, the PEG-lipid is PEG₂ₖ-DMG.

[1180] In one embodiment, the lipid nanoparticles described herein can comprise a PEG lipid which is a non-diffusible PEG. Non-limiting examples of non-diffusible PEGs include PEG-DSG and PEG-DSPE.

[1181] PEG-lipids are known in the art, such as those described in U.S. Pat. No. 8,158,601 and International Publ. No. WO 2015/130584 A2, which are incorporated herein by reference in their entirety.

[1182] In general, some of the other lipid components (e.g., PEG lipids) of various formulae, described herein may be synthesized as described International Patent Application No. PCT/US2016/000129, filed Dec. 10, 2016, entitled “Compositions and Methods for Delivery of Therapeutic Agents,” which is incorporated by reference in its entirety.

[1183] The lipid component of a lipid nanoparticle composition may include one or more molecules comprising polyethylene glycol, such as PEG or PEG-modified lipids. Such species may be alternately referred to as PEGylated lipids. A PEG lipid is a lipid modified with polyethylene glycol. A PEG lipid may be selected from the non-limiting group including PEG-modified phosphatidylethanolamines, PEG-modified phosphatidic acids, PEG-modified ceramides, PEG-modified dialkylamines, PEG-modified diacylglycerols, PEG-modified dialkylglycerols, and mixtures thereof. For example, a PEG lipid may be PEG-c-DOMG, PEG-DMG, PEG-DLPE, PEG-DMPE, PEG-DPPC, or a PEG-DSPE lipid.

[1184] In some embodiments the PEG-modified lipids are a modified form of PEG DMG. PEG-DMG has the following structure:

[chemical structure]

[1185] In one embodiment, PEG lipids useful in the present invention can be PEGylated lipids described in International Publication No. WO2012099755, the contents of which is herein incorporated by reference in its entirety. Any of these exemplary PEG lipids described herein may be modified to comprise a hydroxyl group on the PEG chain. In certain embodiments, the PEG lipid is a PEG-OH lipid. As generally defined herein, a “PEG-OH lipid” (also referred to herein as “hydroxy-PEGylated lipid”) is a PEGylated lipid having one or more hydroxyl (—OH) groups on the lipid. In certain embodiments, the PEG-OH lipid includes one or more hydroxyl groups on the PEG chain. In certain embodiments, a PEG-OH or hydroxy-PEGylated lipid comprises an —OH group at the terminus of the PEG chain. Each possibility represents a separate embodiment of the present invention.

[1186] In certain embodiments, a PEG lipid useful in the present invention is a compound of Formula (VII). Provided herein are compounds of Formula (VII):

[chemical structure]

[1187] or salts thereof, wherein:

[1188] R³ is —OR^{O};

[1189] R^{O} is hydrogen, optionally substituted alkyl, or an oxygen protecting group;

[1190] r is an integer between 1 and 100, inclusive;

[1191] L¹ is optionally substituted C₁₋₁₀ alkylene, wherein at least one methylene of the optionally substituted C₁₋₁₀ alkylene is independently replaced with optionally substituted carbocyclylene, optionally substituted heterocyclylene, optionally substituted arylene, optionally substituted heteroarylene, O, N(R^{N}), S, C(O), C(O)N(R^{N}), NR^{N}C(O), C(O)O, —OC(O), OC(O)O, OC(O)N(R^{N}), NR^{N}C(O)O, or NR^{N}C(O)N(R^{N});

[1192] D is a moiety obtained by click chemistry or a moiety cleavable under physiological conditions;

[1193] m is 0, 1, 2, 3, 4, 5, 6, 7, 8, 9, or 10;

[1194] A is of the formula:

[chemical structure]

[1195] each instance of L² is independently a bond or optionally substituted C₁₋₆ alkylene, wherein one methylene unit of the optionally substituted C₁₋₆ alkylene is optionally replaced with O, N(R^{N}), S, C(O), C(O)N(R^{N}), NR^{N}C(O), C(O)O, OC(O), OC(O)O, —OC(O)N(R^{N}), NR^{N}C(O)O, or NR^{N}C(O)N(R^{N});

[1196] each instance of R² is independently optionally substituted C₁₋₃₀ alkyl, optionally substituted C₁₋₃₀ alkenyl, or optionally substituted C₁₋₃₀ alkynyl; optionally wherein one or more methylene units of R² are independently replaced with optionally substituted carbocyclylene, optionally substituted heterocyclylene, optionally substituted arylene, optionally substituted heteroarylene, N(R^{N}), O, S, C(O), C(O)N(R^{N}), NR^{N}C(O), —NR^{N}C(O)N(R^{N}), C(O)O, OC(O), OC(O)O, OC(O)N(R^{N}), NR^{N}C(O)O, C(O)S, SC(O), —C(═NR^{N}), C(═NR^{N})N(R^{N}), NR^{N}C(═NR^{N}), NR^{N}C(═NR^{N})N(R^{N}), C(S), C(S)N(R^{N}), NR^{N}C(S), —NR^{N}C(S)N(R^{N}), S(O), OS(O), S(O)O, OS(O)O, OS(O)₂, S(O)₂O, OS(O)₂O, N(R^{N})S(O), —S(O)N(R^{N}), N(R^{N})S(O)N(R^{N}), OS(O)N(R^{N}), N(R^{N})S(O)O, S(O)₂, N(R^{N})S(O)₂, S(O)₂N(R^{N}), N(R^{N})S(O)₂N(R^{N}), OS(O)₂N(R^{N}), or N(R^{N})S(O)₂O;

[1197] each instance of R^{N} is independently hydrogen, optionally substituted alkyl, or a nitrogen protecting group;

[1198] Ring B is optionally substituted carbocyclyl, optionally substituted heterocyclyl, optionally substituted aryl, or optionally substituted heteroaryl; and

[1199] p is 1 or 2.

[1200] In certain embodiments, the compound of Formula (VII) is a PEG-OH lipid (i.e., R³ is —OR^{O}, and R^{O} is hydrogen). In certain embodiments, the compound of Formula (VII) is of Formula (VII-OH):

[chemical structure]

[1201] or a salt thereof.

[1202] In certain embodiments, D is a moiety obtained by click chemistry (e.g., triazole). In certain embodiments, the compound of Formula (VII) is of Formula (VII-a-1) or (VII-a-2):

[chemical structure]

[1203] or a salt thereof.

[1204] In certain embodiments, the compound of Formula (VII) is of one of the following formulae:

[chemical structure]

[1205] or a salt thereof, wherein

[1206] s is 0, 1, 2, 3, 4, 5, 6, 7, 8, 9, or 10.

[1207] In certain embodiments, the compound of Formula (VII) is of one of the following formulae:

[chemical structure]

[1208] or a salt thereof.

[1209] In certain embodiments, a compound of Formula (VII) is of one of the following formulae:

[chemical structure]

[1210] or a salt thereof.

[1211] In certain embodiments, a compound of Formula (VII) is of one of the following formulae:

[chemical structure]

[1212] or a salt thereof.

[1213] In certain embodiments, D is a moiety cleavable under physiological conditions (e.g., ester, amide, carbonate, carbamate, urea). In certain embodiments, a compound of Formula (VII) is of Formula (VII-b-1) or (VII-b-2):

[chemical structure]

[1214] or a salt thereof.

[1215] In certain embodiments, a compound of Formula (VII) is of Formula (VII-b-1-OH) or (VII-b-2-OH):

[chemical structure]

[1216] or a salt thereof.

[1217] In certain embodiments, the compound of Formula (VII) is of one of the following formulae:

[chemical structure]

[1218] or a salt thereof.

[1219] In certain embodiments, a compound of Formula (VII) is of one of the following formulae:

[chemical structure]

[1220] or a salt thereof.

[1221] In certain embodiments, a compound of Formula (VII) is of one of the following formulae:

[chemical structure]

[1222] or a salt thereof.

[1223] In certain embodiments, a compound of Formula (VII) is of one of the following formulae:

[chemical structure]

[1224] or salts thereof.

[1225] In certain embodiments, a PEG lipid useful in the present invention is a PEGylated fatty acid. In certain embodiments, a PEG lipid useful in the present invention is a compound of Formula (VIII). Provided herein are compounds of Formula (VIII):

[chemical structure]

[1226] or a salts thereof, wherein:

[1227] R³ is —OR^{O};

[1228] R^{O} is hydrogen, optionally substituted alkyl or an oxygen protecting group;

[1229] r is an integer between 1 and 100, inclusive;

[1230] R⁵ is optionally substituted C₁₀₋₄₀ alkyl, optionally substituted C₁₀₋₄₀ alkenyl, or optionally substituted C₁₀₋₄₀ alkynyl; and optionally one or more methylene groups of R⁵ are replaced with optionally substituted carbocyclylene, optionally substituted heterocyclylene, optionally substituted arylene, optionally substituted heteroarylene, N(R^{N}), —O, S, C(O), C(O)N(R^{N}), NR^{N}C(O), NR^{N}C(O)N(R^{N}), C(O)O, OC(O), OC(O)O, OC(O)N(R^{N}), NR^{N}C(O)O, C(O)S, SC(O), C(═NR^{N}), C(═NR^{N})N(R^{N}), NR^{N}C(═NR^{N}), NR^{N}C(═NR^{N})N(R^{N}), —C(S), C(S)N(R^{N}), NR^{N}C(S), NR^{N}C(S)N(R^{N}), S(O), OS(O), S(O)O, OS(O)O, OS(O)₂, —S(O)₂O, OS(O)₂O, N(R^{N})S(O), S(O)N(R^{N}), N(R^{N})S(O)N(R^{N}), OS(O)N(R^{N}), N(R^{N})S(O)O, —S(O)₂, N(R^{N})S(O)₂, S(O)₂N(R^{N}), N(R^{N})S(O)₂N(R^{N}), OS(O)₂N(R^{N}), or N(R^{N})S(O)₂O; and

[1231] each instance of R^{N} is independently hydrogen, optionally substituted alkyl, or a nitrogen protecting group.

[1232] In certain embodiments, the compound of Formula (VIII) is of Formula (VIII-OH):

[chemical structure]

[1233] or a salt thereof. In some embodiments, r is 45.

[1234] In certain embodiments, a compound of Formula (VIII) is of one of the following formulae:

[chemical structure]

[1235] or a salt thereof. In some embodiments, r is 45.

[1236] In yet other embodiments the compound of Formula (VIII) is:

[chemical structure]

[1237] or a salt thereof.

[1238] In one embodiment, the compound of Formula (VIII) is

[chemical structure]

[1239] In one embodiment, the amount of PEG-lipid in the lipid composition of a pharmaceutical composition disclosed herein ranges from about 0.1 mol % to about 5 mol %, from about 0.5 mol % to about 5 mol %, from about 1 mol % to about 5 mol %, from about 1.5 mol % to about 5 mol %, from about 2 mol % to about 5 mol % mol %, from about 0.1 mol % to about 4 mol %, from about 0.5 mol % to about 4 mol %, from about 1 mol % to about 4 mol %, from about 1.5 mol % to about 4 mol %, from about 2 mol % to about 4 mol %, from about 0.1 mol % to about 3 mol %, from about 0.5 mol % to about 3 mol %, from about 1 mol % to about 3 mol %, from about 1.5 mol % to about 3 mol %, from about 2 mol % to about 3 mol %, from about 0.1 mol % to about 2 mol %, from about 0.5 mol % to about 2 mol %, from about 1 mol % to about 2 mol %, from about 1.5 mol % to about 2 mol %, from about 0.1 mol % to about 1.5 mol %, from about 0.5 mol % to about 1.5 mol %, or from about 1 mol % to about 1.5 mol %.

[1240] In one embodiment, the amount of PEG-lipid in the lipid composition disclosed herein is about 2 mol %. In one embodiment, the amount of PEG-lipid in the lipid composition disclosed herein is about 1.5 mol %.

[1241] In one embodiment, the amount of PEG-lipid in the lipid composition disclosed herein is at least about 0.1, 0.2, 0.3, 0.4, 0.5, 0.6, 0.7, 0.8, 0.9, 1, 1.1, 1.2, 1.3, 1.4, 1.5, 1.6, 1.7, 1.8, 1.9, 2, 2.1, 2.2, 2.3, 2.4, 2.5, 2.6, 2.7, 2.8, 2.9, 3, 3.1, 3.2, 3.3, 3.4, 3.5, 3.6, 3.7, 3.8, 3.9, 4, 4.1, 4.2, 4.3, 4.4, 4.5, 4.6, 4.7, 4.8, 4.9, or 5 mol %.

[1242] In some aspects, the lipid composition of the pharmaceutical compositions disclosed herein does not comprise a PEG-lipid.

[1243] f. Other Ionizable Amino Lipids

[1244] The lipid composition of the pharmaceutical composition disclosed herein can comprise one or more ionizable amino lipids in addition to or instead of a lipid according to Formula (I), (II), (III), (IV), (V), or (VI).

[1245] Ionizable lipids can be selected from the non-limiting group consisting of 3-(didodecylamino)-N1,N1,4-tridodecyl-1-piperazineethanamine (KL10), N1-[2-(didodecylamino)ethyl]-N1,N4,N4-tridodecyl-1,4-piperazinediethanamine (KL22), 14,25-ditridecyl-15,18,21,24-tetraaza-octatriacontane (KL25), 1,2-dilinoleyloxy-N,N-dimethylaminopropane (DLin-DMA), 2,2-dilinoleyl-4-dimethylaminomethyl-[1,3]-dioxolane (DLin-K-DMA), heptatriaconta-6,9,28,31-tetraen-19-yl 4-(dimethylamino)butanoate (DLin-MC3-DMA), 2,2-dilinoleyl-4-(2-dimethylaminoethyl)-[1,3]-dioxolane (DLin-KC2-DMA), 1,2-dioleyloxy-N,N-dimethylaminopropane (DODMA), (13Z,165Z)—N,N-dimethyl-3-nonydocosa-13-16-dien-1-amine (L608), 2-({8-[(3β)-cholest-5-en-3-yloxy]octyl}oxy)-N,N-dimethyl-3-[(9Z,12Z)-octadeca-9,12-dien-1-yloxy]propan-1-amine (Octyl-CLinDMA), (2R)-2-({8-[(3β)-cholest-5-en-3-yloxy]octyl}oxy)-N,N-dimethyl-3-[(9Z,12Z)-octadeca-9,12-dien-1-yloxy]propan-1-amine (Octyl-CLinDMA (2R)), and (2S)-2-((8-[(3β)-cholest-5-en-3-yloxy]octyl}oxy)-N,N-dimethyl-3-[(9Z,12Z)-octadeca-9,12-dien-1-yloxy]propan-1-amine (Octyl-CLinDMA (2S)). In addition to these, an ionizable amino lipid can also be a lipid including a cyclic amine group.

[1246] Ionizable lipids can also be the compounds disclosed in International Publication No. WO 2017/075531 A1, hereby incorporated by reference in its entirety. For example, the ionizable amino lipids include, but not limited to:

[chemical structure]

[1247] and any combination thereof.

[1248] Ionizable lipids can also be the compounds disclosed in International Publication No. WO 2015/199952 A1, hereby incorporated by reference in its entirety. For example, the ionizable amino lipids include, but not limited to:

[chemical structure]

[chemical structure]

[chemical structure]

[1249] and any combination thereof.

[1250] g. Nanoparticle Compositions

[1251] The lipid composition of a pharmaceutical composition disclosed herein can include one or more components in addition to those described above. For example, the lipid composition can include one or more permeability enhancer molecules, carbohydrates, polymers, surface altering agents (e.g., surfactants), or other components. For example, a permeability enhancer molecule can be a molecule described by U.S. Patent Application Publication No. 2005/0222064. Carbohydrates can include simple sugars (e.g., glucose) and polysaccharides (e.g., glycogen and derivatives and analogs thereof).

[1252] A polymer can be included in and/or used to encapsulate or partially encapsulate a pharmaceutical composition disclosed herein (e.g., a pharmaceutical composition in lipid nanoparticle form). A polymer can be biodegradable and/or biocompatible. A polymer can be selected from, but is not limited to, polyamines, polyethers, polyamides, polyesters, polycarbamates, polyureas, polycarbonates, polystyrenes, polyimides, polysulfones, polyurethanes, polyacetylenes, polyethylenes, polyethyleneimines, polyisocyanates, polyacrylates, polymethacrylates, polyacrylonitriles, and polyarylates.

[1253] The ratio between the lipid composition and the polynucleotide range can be from about 10:1 to about 60:1 (wt/wt).

[1254] In some embodiments, the ratio between the lipid composition and the polynucleotide can be about 10:1, 11:1, 12:1, 13:1, 14:1, 15:1, 16:1, 17:1, 18:1, 19:1, 20:1, 21:1, 22:1, 23:1, 24:1, 25:1, 26:1, 27:1, 28:1, 29:1, 30:1, 31:1, 32:1, 33:1, 34:1, 35:1, 36:1, 37:1, 38:1, 39:1, 40:1, 41:1, 42:1, 43:1, 44:1, 45:1, 46:1, 47:1, 48:1, 49:1, 50:1, 51:1, 52:1, 53:1, 54:1, 55:1, 56:1, 57:1, 58:1, 59:1 or 60:1 (wt/wt). In some embodiments, the wt/wt ratio of the lipid composition to the polynucleotide encoding a therapeutic agent is about 20:1 or about 15:1.

[1255] In one embodiment, the lipid nanoparticles described herein can comprise polynucleotides (e.g., mRNA) in a lipid:polynucleotide weight ratio of 5:1, 10:1, 15:1, 20:1, 25:1, 30:1, 35:1, 40:1, 45:1, 50:1, 55:1, 60:1 or 70:1, or a range or any of these ratios such as, but not limited to, 5:1 to about 10:1, from about 5:1 to about 15:1, from about 5:1 to about 20:1, from about 5:1 to about 25:1, from about 5:1 to about 30:1, from about 5:1 to about 35:1, from about 5:1 to about 40:1, from about 5:1 to about 45:1, from about 5:1 to about 50:1, from about 5:1 to about 55:1, from about 5:1 to about 60:1, from about 5:1 to about 70:1, from about 10:1 to about 15:1, from about 10:1 to about 20:1, from about 10:1 to about 25:1, from about 10:1 to about 30:1, from about 10:1 to about 35:1, from about 10:1 to about 40:1, from about 10:1 to about 45:1, from about 10:1 to about 50:1, from about 10:1 to about 55:1, from about 10:1 to about 60:1, from about 10:1 to about 70:1, from about 15:1 to about 20:1, from about 15:1 to about 25:1, from about 15:1 to about 30:1, from about 15:1 to about 35:1, from about 15:1 to about 40:1, from about 15:1 to about 45:1, from about 15:1 to about 50:1, from about 15:1 to about 55:1, from about 15:1 to about 60:1 or from about 15:1 to about 70:1.

[1256] In one embodiment, the lipid nanoparticles described herein can comprise the polynucleotide in a concentration from approximately 0.1 mg/ml to 2 mg/ml such as, but not limited to, 0.1 mg/ml, 0.2 mg/ml, 0.3 mg/ml, 0.4 mg/ml, 0.5 mg/ml, 0.6 mg/ml, 0.7 mg/ml, 0.8 mg/ml, 0.9 mg/ml, 1.0 mg/ml, 1.1 mg/ml, 1.2 mg/ml, 1.3 mg/ml, 1.4 mg/ml, 1.5 mg/ml, 1.6 mg/ml, 1.7 mg/ml, 1.8 mg/ml, 1.9 mg/ml, 2.0 mg/ml or greater than 2.0 mg/ml.

[1257] In some embodiments, the pharmaceutical compositions disclosed herein are formulated as lipid nanoparticles (LNP). Accordingly, the present disclosure also provides nanoparticle compositions comprising (i) a lipid composition comprising a delivery agent such as a compound of Formula (I) or (III) as described herein, and (ii) a polynucleotide encoding a polypeptide of interest. In such nanoparticle composition, the lipid composition disclosed herein can encapsulate the polynucleotide encoding a polypeptide of interest.

[1258] Nanoparticle compositions are typically sized on the order of micrometers or smaller and can include a lipid bilayer. Nanoparticle compositions encompass lipid nanoparticles (LNPs), liposomes (e.g., lipid vesicles), and lipoplexes. For example, a nanoparticle composition can be a liposome having a lipid bilayer with a diameter of 500 nm or less.

[1259] Nanoparticle compositions include, for example, lipid nanoparticles (LNPs), liposomes, and lipoplexes. In some embodiments, nanoparticle compositions are vesicles including one or more lipid bilayers. In certain embodiments, a nanoparticle composition includes two or more concentric bilayers separated by aqueous compartments. Lipid bilayers can be functionalized and/or crosslinked to one another. Lipid bilayers can include one or more ligands, proteins, or channels.

[1260] In some embodiments, the nanoparticle compositions of the present disclosure comprise at least one compound according to Formula (I), (III), (IV), (V), or (VI). For example, the nanoparticle composition can include one or more of Compounds 1-147, or one or more of Compounds 1-342. Nanoparticle compositions can also include a variety of other components. For example, the nanoparticle composition may include one or more other lipids in addition to a lipid according to Formula (I), (II), (III), (IV), (V), or (VI), such as (i) at least one phospholipid, (ii) at least one structural lipid, (iii) at least one PEG-lipid, or (iv) any combination thereof. Inclusion of structural lipid can be optional, for example when lipids according to formula III are used in the lipid nanoparticle compositions of the invention.

[1261] In some embodiments, the nanoparticle composition comprises a compound of Formula (I), (e.g., Compounds 18, 25, 26 or 48). In some embodiments, the nanoparticle composition comprises a compound of Formula (I) (e.g., Compounds 18, 25, 26 or 48) and a phospholipid (e.g., DSPC).

[1262] In some embodiments, the nanoparticle composition comprises a compound of Formula (III) (e.g., Compound 236). In some embodiments, the nanoparticle composition comprises a compound of Formula (III) (e.g., Compound 236) and a phospholipid (e.g., DOPE or DSPC).

[1263] In some embodiments, the nanoparticle composition comprises a lipid composition consisting or consisting essentially of compound of Formula (I) (e.g., Compounds 18, 25, 26 or 48). In some embodiments, the nanoparticle composition comprises a lipid composition consisting or consisting essentially of a compound of Formula (I) (e.g., Compounds 18, 25, 26 or 48) and a phospholipid (e.g., DSPC).

[1264] In some embodiments, the nanoparticle composition comprises a lipid composition consisting or consisting essentially of compound of Formula (III) (e.g., Compound 236). In some embodiments, the nanoparticle composition comprises a lipid composition consisting or consisting essentially of a compound of Formula (III) (e.g., Compound 236) and a phospholipid (e.g., DOPE or DSPC).

[1265] In one embodiment, a lipid nanoparticle comprises an ionizable lipid, a structural lipid, a phospholipid, a PEG-modified lipid, and mRNA. In some embodiments, the LNP comprises an ionizable lipid, a PEG-modified lipid, a sterol and a phospholipid. In some embodiments, the LNP has a molar ratio of about 20-60% ionizable lipid:about 5-25% phospholipid:about 25-55% sterol; and about 0.5-15% PEG-modified lipid. In some embodiments, the LNP comprises a molar ratio of about 50% ionizable lipid, about 1.5% PEG-modified lipid, about 38.5% cholesterol and about 10% phospholipid. In some embodiments, the LNP comprises a molar ratio of about 55% ionizable lipid, about 2.5% PEG lipid, about 32.5% cholesterol and about 10% phospholipid. In some embodiments, the ionizable lipid is an ionizable amino lipid, the neutral lipid is a phospholipid, and the sterol is a cholesterol. In some embodiments, the LNP has a molar ratio of 50:38.5:10:1.5 of ionizable lipid:cholesterol:DSPC:PEG lipid. In some embodiments, the ionizable lipid is Compound 18 or Compound 236, and the PEG lipid is Compound 428 or PEG-DMG.

[1266] In some embodiments, the LNP has a molar ratio of 50:38.5:10:1.5 of Compound 18:Cholesterol:Phospholipid:Compound 428. In some embodiments, the LNP has a molar ratio of 50:38.5:10:1.5 of Compound 18:Cholesterol:DSPC:Compound 428. In some embodiments, the LNP has a molar ratio of 50:38.5:10:1.5 of Compound 18:Cholesterol:Phospholipid:PEG-DMG. In some embodiments, the LNP has a molar ratio of 50:38.5:10:1.5 of Compound 18:Cholesterol:DSPC:PEG-DMG.

[1267] In some embodiments, the LNP has a molar ratio of 50:38.5:10:1.5 of Compound 236:Cholesterol:Phospholipid:Compound 428. In some embodiments, the LNP has a molar ratio of 50:38.5:10:1.5 of Compound 236:Cholesterol:DSPC:Compound 428.

[1268] In some embodiments, the LNP has a molar ratio of 40:38.5:20:1.5 of Compound 18:Cholesterol:Phospholipid:Compound 428. In some embodiments, the LNP has a molar ratio of 40:38.5:20:1.5 of Compound 18:Cholesterol:DSPC:Compound 428. In some embodiments, the LNP has a molar ratio of 40:38.5:20:1.5 of Compound 18:Cholesterol:Phospholipid:PEG-DMG. In some embodiments, the LNP has a molar ratio of 40:38.5:20:1.5 of Compound 18:Cholesterol:DSPC:PEG-DMG.

[1269] In some embodiments, a nanoparticle composition can have the formulation of Compound 18:Phospholipid:Chol:Compound 428 with a mole ratio of 50:10:38.5:1.5. In some embodiments, a nanoparticle composition can have the formulation of Compound 18:DSPC:Chol:Compound 428 with a mole ratio of 50:10:38.5:1.5. In some embodiments, a nanoparticle composition can have the formulation of Compound 18:Phospholipid:Chol:PEG-DMG with a mole ratio of 50:10:38.5:1.5. In some embodiments, a nanoparticle composition can have the formulation of Compound 18:DSPC:Chol:PEG-DMG with a mole ratio of 50:10:38.5:1.5.

[1270] In some embodiments, the LNP has a polydispersity value of less than 0.4. In some embodiments, the LNP has a net neutral charge at a neutral pH. In some embodiments, the LNP has a mean diameter of 50-150 nm. In some embodiments, the LNP has a mean diameter of 80-100 nm.

[1271] As generally defined herein, the term “lipid” refers to a small molecule that has hydrophobic or amphiphilic properties. Lipids may be naturally occurring or synthetic. Examples of classes of lipids include, but are not limited to, fats, waxes, sterol-containing metabolites, vitamins, fatty acids, glycerolipids, glycerophospholipids, sphingolipids, saccharolipids, and polyketides, and prenol lipids. In some instances, the amphiphilic properties of some lipids leads them to form liposomes, vesicles, or membranes in aqueous media.

[1272] In some embodiments, a lipid nanoparticle (LNP) may comprise an ionizable lipid. As used herein, the term “ionizable lipid” has its ordinary meaning in the art and may refer to a lipid comprising one or more charged moieties. In some embodiments, an ionizable lipid may be positively charged or negatively charged. An ionizable lipid may be positively charged, in which case it can be referred to as “cationic lipid”. In certain embodiments, an ionizable lipid molecule may comprise an amine group, and can be referred to as an ionizable amino lipids. As used herein, a “charged moiety” is a chemical moiety that carries a formal electronic charge, e.g., monovalent (+1, or −1), divalent (+2, or −2), trivalent (+3, or −3), etc. The charged moiety may be anionic (i.e., negatively charged) or cationic (i.e., positively charged). Examples of positively-charged moieties include amine groups (e.g., primary, secondary, and/or tertiary amines), ammonium groups, pyridinium group, guanidine groups, and imidizolium groups. In a particular embodiment, the charged moieties comprise amine groups. Examples of negatively-charged groups or precursors thereof, include carboxylate groups, sulfonate groups, sulfate groups, phosphonate groups, phosphate groups, hydroxyl groups, and the like. The charge of the charged moiety may vary, in some cases, with the environmental conditions, for example, changes in pH may alter the charge of the moiety, and/or cause the moiety to become charged or uncharged. In general, the charge density of the molecule may be selected as desired.

[1273] It should be understood that the terms “charged” or “charged moiety” does not refer to a “partial negative charge” or “partial positive charge” on a molecule. The terms “partial negative charge” and “partial positive charge” are given its ordinary meaning in the art. A “partial negative charge” may result when a functional group comprises a bond that becomes polarized such that electron density is pulled toward one atom of the bond, creating a partial negative charge on the atom. Those of ordinary skill in the art will, in general, recognize bonds that can become polarized in this way.

[1274] In some embodiments, the ionizable lipid is an ionizable amino lipid, sometimes referred to in the art as an “ionizable cationic lipid”. In one embodiment, the ionizable amino lipid may have a positively charged hydrophilic head and a hydrophobic tail that are connected via a linker structure.

[1275] In addition to these, an ionizable lipid may also be a lipid including a cyclic amine group.

[1276] In one embodiment, the ionizable lipid may be selected from, but not limited to, a ionizable lipid described in International Publication Nos. WO2013086354 and WO2013116126; the contents of each of which are herein incorporated by reference in their entirety.

[1277] In yet another embodiment, the ionizable lipid may be selected from, but not limited to, formula CLI-CLXXXXII of U.S. Pat. No. 7,404,969; each of which is herein incorporated by reference in their entirety.

[1278] In one embodiment, the lipid may be a cleavable lipid such as those described in International Publication No. WO2012170889, herein incorporated by reference in its entirety. In one embodiment, the lipid may be synthesized by methods known in the art and/or as described in International Publication Nos. WO2013086354; the contents of each of which are herein incorporated by reference in their entirety.

[1279] Nanoparticle compositions can be characterized by a variety of methods. For example, microscopy (e.g., transmission electron microscopy or scanning electron microscopy) can be used to examine the morphology and size distribution of a nanoparticle composition. Dynamic light scattering or potentiometry (e.g., potentiometric titrations) can be used to measure zeta potentials. Dynamic light scattering can also be utilized to determine particle sizes. Instruments such as the Zetasizer Nano ZS (Malvern Instruments Ltd, Malvern, Worcestershire, UK) can also be used to measure multiple characteristics of a nanoparticle composition, such as particle size, polydispersity index, and zeta potential.

[1280] In some embodiments, the nanoparticle composition comprises a lipid composition consisting or consisting essentially of compound of Formula (I) (e.g., Compounds 18, 25, 26 or 48). In some embodiments, the nanoparticle composition comprises a lipid composition consisting or consisting essentially of a compound of Formula (I) (e.g., Compounds 18, 25, 26 or 48) and a phospholipid (e.g., DSPC or MSPC).

[1281] Nanoparticle compositions can be characterized by a variety of methods. For example, microscopy (e.g., transmission electron microscopy or scanning electron microscopy) can be used to examine the morphology and size distribution of a nanoparticle composition. Dynamic light scattering or potentiometry (e.g., potentiometric titrations) can be used to measure zeta potentials. Dynamic light scattering can also be utilized to determine particle sizes. Instruments such as the Zetasizer Nano ZS (Malvern Instruments Ltd, Malvern, Worcestershire, UK) can also be used to measure multiple characteristics of a nanoparticle composition, such as particle size, polydispersity index, and zeta potential.

[1282] The size of the nanoparticles can help counter biological reactions such as, but not limited to, inflammation, or can increase the biological effect of the polynucleotide.

[1283] As used herein, “size” or “mean size” in the context of nanoparticle compositions refers to the mean diameter of a nanoparticle composition.

[1284] In one embodiment, the polynucleotide encoding a polypeptide of interest are formulated in lipid nanoparticles having a diameter from about 10 to about 100 nm such as, but not limited to, about 10 to about 20 nm, about 10 to about 30 nm, about 10 to about 40 nm, about 10 to about 50 nm, about 10 to about 60 nm, about 10 to about 70 nm, about 10 to about 80 nm, about 10 to about 90 nm, about 20 to about 30 nm, about 20 to about 40 nm, about 20 to about 50 nm, about 20 to about 60 nm, about 20 to about 70 nm, about 20 to about 80 nm, about 20 to about 90 nm, about 20 to about 100 nm, about 30 to about 40 nm, about 30 to about 50 nm, about 30 to about 60 nm, about 30 to about 70 nm, about 30 to about 80 nm, about 30 to about 90 nm, about 30 to about 100 nm, about 40 to about 50 nm, about 40 to about 60 nm, about 40 to about 70 nm, about 40 to about 80 nm, about 40 to about 90 nm, about 40 to about 100 nm, about 50 to about 60 nm, about 50 to about 70 nm, about 50 to about 80 nm, about 50 to about 90 nm, about 50 to about 100 nm, about 60 to about 70 nm, about 60 to about 80 nm, about 60 to about 90 nm, about 60 to about 100 nm, about 70 to about 80 nm, about 70 to about 90 nm, about 70 to about 100 nm, about 80 to about 90 nm, about 80 to about 100 nm and/or about 90 to about 100 nm.

[1285] In one embodiment, the nanoparticles have a diameter from about 10 to 500 nm. In one embodiment, the nanoparticle has a diameter greater than 100 nm, greater than 150 nm, greater than 200 nm, greater than 250 nm, greater than 300 nm, greater than 350 nm, greater than 400 nm, greater than 450 nm, greater than 500 nm, greater than 550 nm, greater than 600 nm, greater than 650 nm, greater than 700 nm, greater than 750 nm, greater than 800 nm, greater than 850 nm, greater than 900 nm, greater than 950 nm or greater than 1000 nm.

[1286] In some embodiments, the largest dimension of a nanoparticle composition is 1 μm or shorter (e.g., 1 μm, 900 nm, 800 nm, 700 nm, 600 nm, 500 nm, 400 nm, 300 nm, 200 nm, 175 nm, 150 nm, 125 nm, 100 nm, 75 nm, 50 nm, or shorter).

[1287] A nanoparticle composition can be relatively homogenous. A polydispersity index can be used to indicate the homogeneity of a nanoparticle composition, e.g., the particle size distribution of the nanoparticle composition. A small (e.g., less than 0.3) polydispersity index generally indicates a narrow particle size distribution. A nanoparticle composition can have a polydispersity index from about 0 to about 0.25, such as 0.01, 0.02, 0.03, 0.04, 0.05, 0.06, 0.07, 0.08, 0.09, 0.10, 0.11, 0.12, 0.13, 0.14, 0.15, 0.16, 0.17, 0.18, 0.19, 0.20, 0.21, 0.22, 0.23, 0.24, or 0.25. In some embodiments, the polydispersity index of a nanoparticle composition disclosed herein can be from about 0.10 to about 0.20.

[1288] The zeta potential of a nanoparticle composition can be used to indicate the electrokinetic potential of the composition. For example, the zeta potential can describe the surface charge of a nanoparticle composition. Nanoparticle compositions with relatively low charges, positive or negative, are generally desirable, as more highly charged species can interact undesirably with cells, tissues, and other elements in the body. In some embodiments, the zeta potential of a nanoparticle composition disclosed herein can be from about −10 mV to about +20 mV, from about −10 mV to about +15 mV, from about 10 mV to about +10 mV, from about −10 mV to about +5 mV, from about −10 mV to about 0 mV, from about −10 mV to about −5 mV, from about −5 mV to about +20 mV, from about −5 mV to about +15 mV, from about −5 mV to about +10 mV, from about −5 mV to about +5 mV, from about −5 mV to about 0 mV, from about 0 mV to about +20 mV, from about 0 mV to about +15 mV, from about 0 mV to about +10 mV, from about 0 mV to about +5 mV, from about +5 mV to about +20 mV, from about +5 mV to about +15 mV, or from about +5 mV to about +10 mV.

[1289] In some embodiments, the zeta potential of the lipid nanoparticles can be from about 0 mV to about 100 mV, from about 0 mV to about 90 mV, from about 0 mV to about 80 mV, from about 0 mV to about 70 mV, from about 0 mV to about 60 mV, from about 0 mV to about 50 mV, from about 0 mV to about 40 mV, from about 0 mV to about 30 mV, from about 0 mV to about 20 mV, from about 0 mV to about 10 mV, from about 10 mV to about 100 mV, from about 10 mV to about 90 mV, from about 10 mV to about 80 mV, from about 10 mV to about 70 mV, from about 10 mV to about 60 mV, from about 10 mV to about 50 mV, from about 10 mV to about 40 mV, from about 10 mV to about 30 mV, from about 10 mV to about 20 mV, from about 20 mV to about 100 mV, from about 20 mV to about 90 mV, from about 20 mV to about 80 mV, from about 20 mV to about 70 mV, from about 20 mV to about 60 mV, from about 20 mV to about 50 mV, from about 20 mV to about 40 mV, from about 20 mV to about 30 mV, from about 30 mV to about 100 mV, from about 30 mV to about 90 mV, from about 30 mV to about 80 mV, from about 30 mV to about 70 mV, from about 30 mV to about 60 mV, from about 30 mV to about 50 mV, from about 30 mV to about 40 mV, from about 40 mV to about 100 mV, from about 40 mV to about 90 mV, from about 40 mV to about 80 mV, from about 40 mV to about 70 mV, from about 40 mV to about 60 mV, and from about 40 mV to about 50 mV. In some embodiments, the zeta potential of the lipid nanoparticles can be from about 10 mV to about 50 mV, from about 15 mV to about 45 mV, from about 20 mV to about 40 mV, and from about 25 mV to about 35 mV. In some embodiments, the zeta potential of the lipid nanoparticles can be about 10 mV, about 20 mV, about 30 mV, about 40 mV, about 50 mV, about 60 mV, about 70 mV, about 80 mV, about 90 mV, and about 100 mV.

[1290] The term “encapsulation efficiency” of a polynucleotide describes the amount of the polynucleotide that is encapsulated by or otherwise associated with a nanoparticle composition after preparation, relative to the initial amount provided. As used herein, “encapsulation” can refer to complete, substantial, or partial enclosure, confinement, surrounding, or encasement.

[1291] Encapsulation efficiency is desirably high (e.g., close to 100%). The encapsulation efficiency can be measured, for example, by comparing the amount of the polynucleotide in a solution containing the nanoparticle composition before and after breaking up the nanoparticle composition with one or more organic solvents or detergents.

[1292] Fluorescence can be used to measure the amount of free polynucleotide in a solution. For the nanoparticle compositions described herein, the encapsulation efficiency of a polynucleotide can be at least 50%, for example 50%, 55%, 60%, 65%, 70%, 75%, 80%, 85%, 90%, 91%, 92%, 93%, 94%, 95%, 96%, 97%, 98%, 99%, or 100%. In some embodiments, the encapsulation efficiency can be at least 80%. In certain embodiments, the encapsulation efficiency can be at least 90%.

[1293] The amount of a polynucleotide present in a pharmaceutical composition disclosed herein can depend on multiple factors such as the size of the polynucleotide, desired target and/or application, or other properties of the nanoparticle composition as well as on the properties of the polynucleotide.

[1294] For example, the amount of an mRNA useful in a nanoparticle composition can depend on the size (expressed as length, or molecular mass), sequence, and other characteristics of the mRNA. The relative amounts of a polynucleotide in a nanoparticle composition can also vary.

[1295] The relative amounts of the lipid composition and the polynucleotide present in a lipid nanoparticle composition of the present disclosure can be optimized according to considerations of efficacy and tolerability. For compositions including an mRNA as a polynucleotide, the N:P ratio can serve as a useful metric.

[1296] As the N:P ratio of a nanoparticle composition controls both expression and tolerability, nanoparticle compositions with low N:P ratios and strong expression are desirable. N:P ratios vary according to the ratio of lipids to RNA in a nanoparticle composition.

[1297] In general, a lower N:P ratio is preferred. The one or more RNA, lipids, and amounts thereof can be selected to provide an N:P ratio from about 2:1 to about 30:1, such as 2:1, 3:1, 4:1, 5:1, 6:1, 7:1, 8:1, 9:1, 10:1, 12:1, 14:1, 16:1, 18:1, 20:1, 22:1, 24:1, 26:1, 28:1, or 30:1. In certain embodiments, the N:P ratio can be from about 2:1 to about 8:1. In other embodiments, the N:P ratio is from about 5:1 to about 8:1. In certain embodiments, the N:P ratio is between 5:1 and 6:1. In one specific aspect, the N:P ratio is about is about 5.67:1.

[1298] In addition to providing nanoparticle compositions, the present disclosure also provides methods of producing lipid nanoparticles comprising encapsulating a polynucleotide. Such method comprises using any of the pharmaceutical compositions disclosed herein and producing lipid nanoparticles in accordance with methods of production of lipid nanoparticles known in the art. See, e.g., Wang et al. (2015) “Delivery of oligonucleotides with lipid nanoparticles” Adv. Drug Deliv. Rev. 87:68-80; Silva et al. (2015) “Delivery Systems for Biopharmaceuticals. Part I: Nanoparticles and Microparticles” Curr. Pharm. Technol. 16: 940-954; Naseri et al. (2015) “Solid Lipid Nanoparticles and Nanostructured Lipid Carriers: Structure, Preparation and Application” Adv. Pharm. Bull. 5:305-13; Silva et al. (2015) “Lipid nanoparticles for the delivery of biopharmaceuticals” Curr. Pharm. Biotechnol. 16:291-302, and references cited therein.

### Pharmaceutical Compositions

[1299] The present disclosure includes pharmaceutical compositions comprising an mRNA or a nanoparticle (e.g., a lipid nanoparticle) described herein, in combination with one or more pharmaceutically acceptable excipient, carrier or diluent. In particular embodiments, the mRNA is present in a nanoparticle, e.g., a lipid nanoparticle. In particular embodiments, the mRNA or nanoparticle is present in a pharmaceutical composition. In various embodiments, the one or more mRNA present in the pharmaceutical composition is encapsulated in a nanoparticle, e.g., a lipid nanoparticle. In particular embodiments, the molar ratio of the first mRNA to the second mRNA is about 1:50, about 1:25, about 1:10, about 1:5, about 1:4, about 1:3, about 1:2, about 1:1, about 2:1, about 3:1, about 4:1, or about 5:1, about 10:1, about 25:1 or about 50:1. In particular embodiments, the molar ratio of the first mRNA to the second mRNA is greater than 1:1.

[1300] In some embodiments, a composition described herein comprises an mRNA encoding an antigen of interest (Ag) and an mRNA encoding a polypeptide that enhances an immune response to the antigen of interest (e.g., immune potentiator (IP), e.g., STING polypeptide) wherein the mRNA encoding the antigen of interest (Ag) and the mRNA encoding the polypeptide that enhances an immune response to the antigen of interest (e.g., immune potentiator, e.g., STING polypeptide) (IP) are formulated at an Ag:IP mass ratio of 1:1, 2:1, 3:1, 4:1, 5:1, 6:1, 7:1, 8:1, 9:1, 10:1 or 20:1. Alternatively, the IP:Ag mass ratio can be, for example, 1:1, 1:2, 1:3, 1:4, 1:5, 1:6, 1:7, 1:8, 1:9, 1:10 or 1:20. In some embodiments, the composition is formulated at an Ag:IP mass ratio of 1:1. 1.25:1, 1.50:1, 1.75:1, 2.0:1, 2.25:1, 2.50:1, 2.75:1, 3.0:1, 3.25:1, 3.50:1, 3.75:1, 4.0:1, 4.25:1, 4.50:1, 4.75:1 or 5:1 of mRNA encoding the antigen of interest to the mRNA encoding the polypeptide that enhances an immune to the antigen of interest (e.g., immune potentiator, e.g., STING polypeptide). In some embodiments, the composition is formulated at a mass ratio of 5:1 of mRNA encoding the antigen of interest to the mRNA encoding the polypeptide that enhances an immune to the antigen of interest (e.g., immune potentiator, e.g., STING polypeptide) (Ag:IP ratio or 5:1; or alternatively, an IP:Ag ratio of 1:5). In some embodiments, the composition is formulated at a mass ratio of 10:1 of mRNA encoding the antigen of interest to the mRNA encoding the polypeptide that enhances an immune to the antigen of interest (e.g., immune potentiator, e.g., STING polypeptide) (Ag:IP ratio of 10:1, or alternatively, an IP:Ag ratio of 1:10).

[1301] Coformulations that contain both an mRNA construct encoding an immune protentiator and an mRNA construct encoding an antigen of interest may be particularly beneficial for priming of CD8+ T cells and inducing antigen-specific immune responses (e.g., anti-tumor immunity). It has been reported in that art that direct activation of antigen-presenting cells (APCs) by pathogen-associated molecular patterns (PAMPs) is required for CD8+ T cell priming, whereas APCs indirectly activated by proinflammatory mediators were not effective in priming CD8+ T cells (Kratky, W. et al. (2011) Proc. Natl. Acad. Sci. USA 108:17414-17419). Accordingly, coformulation of mRNA constructs encoding an immune potentiator and an antigen of interest may be particularly beneficial for directly activating APCs and priming CD8+ T cells.

[1302] Pharmaceutical compositions may optionally include one or more additional active substances, for example, therapeutically and/or prophylactically active substances. Pharmaceutical compositions of the present disclosure may be sterile and/or pyrogen-free. General considerations in the formulation and/or manufacture of pharmaceutical agents may be found, for example, in Remington: The Science and Practice of Pharmacy 21^{st} ed., Lippincott Williams & Wilkins, 2005 (incorporated herein by reference in its entirety). In particular embodiments, a pharmaceutical composition comprises an mRNA and a lipid nanoparticle, or complexes thereof.

[1303] Formulations of the pharmaceutical compositions described herein may be prepared by any method known or hereafter developed in the art of pharmacology. In general, such preparatory methods include the step of bringing the active ingredient into association with an excipient and/or one or more other accessory ingredients, and then, if necessary and/or desirable, dividing, shaping and/or packaging the product into a desired single- or multi-dose unit.

[1304] Relative amounts of the active ingredient, the pharmaceutically acceptable excipient, and/or any additional ingredients in a pharmaceutical composition in accordance with the disclosure will vary, depending upon the identity, size, and/or condition of the subject treated and further depending upon the route by which the composition is to be administered. By way of example, the composition may include between 0.1% and 100%, e.g., between 0.5% and 70%, between 1% and 30%, between 5% and 80%, or at least 80% (w/w) active ingredient.

[1305] The mRNAs of the disclosure can be formulated using one or more excipients to: (1) increase stability; (2) increase cell transfection; (3) permit the sustained or delayed release (e.g., from a depot formulation of the mRNA); (4) alter the biodistribution (e.g., target the mRNA to specific tissues or cell types); (5) increase the translation of a polypeptide encoded by the mRNA in vivo; and/or (6) alter the release profile of a polypeptide encoded by the mRNA in vivo. In addition to traditional excipients such as any and all solvents, dispersion media, diluents, or other liquid vehicles, dispersion or suspension aids, surface active agents, isotonic agents, thickening or emulsifying agents, preservatives, excipients of the present disclosure can include, without limitation, lipidoids, liposomes, lipid nanoparticles (e.g., liposomes and micelles), polymers, lipoplexes, core-shell nanoparticles, peptides, proteins, carbohydrates, cells transfected with mRNAs (e.g., for transplantation into a subject), hyaluronidase, nanoparticle mimics and combinations thereof. Accordingly, the formulations of the disclosure can include one or more excipients, each in an amount that together increases the stability of the mRNA, increases cell transfection by the mRNA, increases the expression of a polypeptide encoded by the mRNA, and/or alters the release profile of a mRNA-encoded polypeptide. Further, the mRNAs of the present disclosure may be formulated using self-assembled nucleic acid nanoparticles.

[1306] Various excipients for formulating pharmaceutical compositions and techniques for preparing the composition are known in the art (see Remington: The Science and Practice of Pharmacy, 21st Edition, A. R. Gennaro, Lippincott, Williams & Wilkins, Baltimore, Md., 2006; incorporated herein by reference in its entirety). The use of a conventional excipient medium may be contemplated within the scope of the present disclosure, except insofar as any conventional excipient medium may be incompatible with a substance or its derivatives, such as by producing any undesirable biological effect or otherwise interacting in a deleterious manner with any other component(s) of the pharmaceutical composition. Excipients may include, for example: antiadherents, antioxidants, binders, coatings, compression aids, disintegrants, dyes (colors), emollients, emulsifiers, fillers (diluents), film formers or coatings, glidants (flow enhancers), lubricants, preservatives, printing inks, sorbents, suspensing or dispersing agents, sweeteners, and waters of hydration. Exemplary excipients include, but are not limited to: butylated hydroxytoluene (BHT), calcium carbonate, calcium phosphate (dibasic), calcium stearate, croscarmellose, crosslinked polyvinyl pyrrolidone, citric acid, crospovidone, cysteine, ethylcellulose, gelatin, hydroxypropyl cellulose, hydroxypropyl methylcellulose, lactose, magnesium stearate, maltitol, mannitol, methionine, methylcellulose, methyl paraben, microcrystalline cellulose, polyethylene glycol, polyvinyl pyrrolidone, povidone, pregelatinized starch, propyl paraben, retinyl palmitate, shellac, silicon dioxide, sodium carboxymethyl cellulose, sodium citrate, sodium starch glycolate, sorbitol, starch (corn), stearic acid, sucrose, talc, titanium dioxide, vitamin A, vitamin E, vitamin C, and xylitol.

[1307] In some embodiments, the formulations described herein may include at least one pharmaceutically acceptable salt. Examples of pharmaceutically acceptable salts that may be included in a formulation of the disclosure include, but are not limited to, acid addition salts, alkali or alkaline earth metal salts, mineral or organic acid salts of basic residues such as amines; alkali or organic salts of acidic residues such as carboxylic acids; and the like. Representative acid addition salts include acetate, acetic acid, adipate, alginate, ascorbate, aspartate, benzenesulfonate, benzene sulfonic acid, benzoate, bisulfate, borate, butyrate, camphorate, camphorsulfonate, citrate, cyclopentanepropionate, digluconate, dodecylsulfate, ethanesulfonate, fumarate, glucoheptonate, glycerophosphate, hemisulfate, heptonate, hexanoate, hydrobromide, hydrochloride, hydroiodide, 2-hydroxy-ethanesulfonate, lactobionate, lactate, laurate, lauryl sulfate, malate, maleate, malonate, methanesulfonate, 2-naphthalenesulfonate, nicotinate, nitrate, oleate, oxalate, palmitate, pamoate, pectinate, persulfate, 3-phenylpropionate, phosphate, picrate, pivalate, propionate, stearate, succinate, sulfate, tartrate, thiocyanate, toluenesulfonate, undecanoate, valerate salts, and the like. Representative alkali or alkaline earth metal salts include sodium, lithium, potassium, calcium, magnesium, and the like, as well as nontoxic ammonium, quaternary ammonium, and amine cations, including, but not limited to ammonium, tetramethylammonium, tetraethylammonium, methylamine, dimethylamine, trimethylamine, triethylamine, ethylamine, and the like.

[1308] In some embodiments, the formulations described herein may contain at least one type of polynucleotide. As a non-limiting example, the formulations may contain 1, 2, 3, 4, 5 or more than 5 mRNAs described herein. In some embodiments, the formulations described herein may contain at least one mRNA encoding a polypeptide and at least one nucleic acid sequence such as, but not limited to, an siRNA, an shRNA, a snoRNA, and an miRNA.

[1309] Liquid dosage forms for e.g., parenteral administration include, but are not limited to, pharmaceutically acceptable emulsions, microemulsions, nanoemulsions, solutions, suspensions, syrups, and/or elixirs. In addition to active ingredients, liquid dosage forms may comprise inert diluents commonly used in the art such as, for example, water or other solvents, solubilizing agents and emulsifiers such as ethyl alcohol, isopropyl alcohol, ethyl carbonate, ethyl acetate, benzyl alcohol, benzyl benzoate, propylene glycol, 1,3-butylene glycol, dimethylformamide, oils (in particular, cottonseed, groundnut, corn, germ, olive, castor, and sesame oils), glycerol, tetrahydrofurfuryl alcohol, polyethylene glycols and fatty acid esters of sorbitan, and mixtures thereof. Besides inert diluents, oral compositions can include adjuvants such as wetting agents, emulsifying and/or suspending agents. In certain embodiments for parenteral administration, compositions are mixed with solubilizing agents such as CREMAPHOR®, alcohols, oils, modified oils, glycols, polysorbates, cyclodextrins, polymers, and/or combinations thereof.

[1310] Injectable preparations, for example, sterile injectable aqueous or oleaginous suspensions may be formulated according to the known art using suitable dispersing agents, wetting agents, and/or suspending agents. Sterile injectable preparations may be sterile injectable solutions, suspensions, and/or emulsions in nontoxic parenterally acceptable diluents and/or solvents, for example, as a solution in 1,3-butanediol. Among the acceptable vehicles and solvents that may be employed are water, Ringer's solution, U.S.P., and isotonic sodium chloride solution. Sterile, fixed oils are conventionally employed as a solvent or suspending medium. For this purpose any bland fixed oil can be employed including synthetic mono- or diglycerides. Fatty acids such as oleic acid can be used in the preparation of injectables. Injectable formulations can be sterilized, for example, by filtration through a bacterial-retaining filter, and/or by incorporating sterilizing agents in the form of sterile solid compositions which can be dissolved or dispersed in sterile water or other sterile injectable medium prior to use.

[1311] In some embodiments, pharmaceutical compositions including at least one mRNA described herein are administered to mammals (e.g., humans). Although the descriptions of pharmaceutical compositions provided herein are principally directed to pharmaceutical compositions which are suitable for administration to humans, it will be understood by the skilled artisan that such compositions are generally suitable for administration to any other animal, e.g., to a non-human mammal. Modification of pharmaceutical compositions suitable for administration to humans in order to render the compositions suitable for administration to various animals is well understood, and the ordinarily skilled veterinary pharmacologist can design and/or perform such modification with merely ordinary, if any, experimentation. Subjects to which administration of the pharmaceutical compositions is contemplated include, but are not limited to, humans and/or other primates; mammals, including commercially relevant mammals such as cattle, pigs, horses, sheep, cats, dogs, mice, and/or rats; and/or birds, including commercially relevant birds such as poultry, chickens, ducks, geese, and/or turkeys. In particular embodiments, a subject is provided with two or more mRNAs described herein. In particular embodiments, the first and second mRNAs are provided to the subject at the same time or at different times, e.g., sequentially. In particular embodiments, the first and second mRNAs are provided to the subject in the same pharmaceutical composition or formulation, e.g., to facilitate uptake of both mRNAs by the same cells.

[1312] The present disclosure also includes kits comprising a container comprising a mRNA encoding a polypeptide that enhances an immune response. In another embodiment, the kit comprises a container comprising a mRNA encoding a polypeptide that enhances an immune response, as well as one or more additional mRNAs encoding one or more antigens or interest. In other embodiments, the kit comprises a first container comprising the mRNA encoding a polypeptide that enhances an immune response and a second container comprising one or more mRNAs encoding one or more antigens of interest. In particular embodiments, the mRNAs for enhancing an immune response and the mRNA(s) encoding an antigen(s) are present in the same or different nanoparticles and/or pharmaceutical compositions. In particular embodiments, the mRNAs are lyophilized, dried, or freeze-dried.

### Methods of Enhancing Immune Responses

[1313] The disclosure provides a method for enhancing an immune response to an antigen of interest in a subject, e.g., a human subject. In one embodiment, the method comprises administering to the subject a composition of the disclosure (or lipid nanoparticle thereof, or pharmaceutical composition thereof) comprising at least one mRNA construct encoding: (i) at least one antigen of interest and (ii) a polypeptide that enhances an immune response against the antigen(s) of interest, such that an immune response to the antigen(s) of interest is enhanced. In one embodiment, enhancing an immune response comprises stimulating cytokine production. In another embodiment, enhancing an immune response comprises enhancing cellular immunity (T cell responses), such as stimulating antigen-specific CD8⁺ T cell activity, stimulating antigen-specific CD4⁺ T cell activity or increasing the percentage of “effector memory” CD62L^{lo} T cells. In another embodiment, enhancing an immune response comprises enhancing humoral immunity (B cell responses), such as stimulating antigen-specific antibody production.

[1314] In one embodiment of the method, the immune potentiator mRNA encodes a polypeptide that stimulates Type I interferon pathway signaling (e.g., the immune potentiator encodes a polypeptide such as STING, IRF3, IRF7 or any of the additional immune potentiators described herein). In various other embodiment of the method, the immune potentiator encodes a polypeptide that stimulates NFkB pathway signaling, stimulates an inflammatory response or stimulates dendritic cell development, activity or mobilization. In one embodiment, the method comprises administering to the subject an mRNA composition that stimulates dendritic cell development, activity or mobilization prior to administering to the subject an mRNA composition that stimulates Type I interferon pathway signaling. For example, the mRNA composition that stimulates dendritic cell development or activity can be administered 1-30 days, e.g., 3 days, 5 days, 7 days, 10 days, 14 days, 21 days, 28 days, prior to administering the mRNA composition that stimulates Type I interferon pathway signaling.

[1315] Enhancement of an immune response in a subject against an antigen(s) of interest by an immune potentiator of the disclosure can be evaluated by a variety of methods established in the art for assessing immune responses, including but not limited to the methods described in the Examples. For example, in various embodiments, enhancement is evaluated by levels of intracellular staining (ICS) of CD8⁺ cells for IFN-γ or TNF-α, percentage of splenic or peripheral CD8b⁺ cells, or percentage of splenic or peripheral “effector memory” CD62L^{lo} cells.

[1316] It has been reported that the outcome of STING-mediated signaling can vary between different cell types, with T cells in particular exhibiting a stronger STING response as compared to other cell types (e.g., macrophages and dendritic cells), along with T cells exhibiting increased expression levels of STING (Gulen, M. F. et al. (2017) Nature Comm. 8(1):427). Thus, the magnitude of STING signaling can result in distinct effector responses, thereby allowing for adjustment and fine-tuning of STING-mediated responses depending on dosage, cell-type expression and/or co-formulation with an antigen of interest (e.g., Ag:STING ratio). Data described in the Examples indicates that there is a wide therapeutic window in which STING exhibits effectiveness in enhancing antigen-specific immune responses.

[1317] Compositions of the disclosure are administered to the subject at an effective amount. In general, an effective amount of the composition will allow for efficient production of the encoded polypeptide in the cell. Metrics for efficiency may include polypeptide translation (indicated by polypeptide expression), level of mRNA degradation, and immune response indicators.

### Methods of Inducing Immunogenic Cell Death

[1318] The invention provides methods of inducing immunogenic cell death in a cell, e.g., a mammalian cell. In one embodiment, the cell is a human cell. In some embodiments, a method of inducing immunogenic cell death in a cell involves contacting a cell with an mRNA described herein, e.g., an mRNA encoding a polypeptide that induces immunogenic cell death, such as necroptosis or pyroptosis. In certain embodiments, such a method involves contacting a cell with an isolated mRNA encoding the polypeptide that induces immunogenic cell death. In particular embodiments, the cell is contacted with a lipid nanoparticle composition including an mRNA encoding a polypeptide that induces immunogenic cell death. Upon contacting the cell with the lipid nanoparticle composition or the isolated mRNA, the mRNA may be taken up and translated in the cell to produce the polypeptide that induces immunogenic cell death. In one embodiment, the immunogenic cell death is characterized by cell swelling, plasma membrane rupture and release of cytosolic contents of the cell. In one embodiment, the immunogenic cell death is characterized by release of ATP and HMGB1 from the cell.

[1319] The invention further provides methods of selectively inducing immunogenic cell death in a cancer cell as compared to a normal cell. In some embodiments, a method of selectively inducing immunogenic cell death in a cancer cell involves contacting a cell with an mRNA described herein, e.g., an mRNA encoding a polypeptide that induces immunogenic cell death, wherein the mRNA further comprises a regulatory element that reduces expression of the polypeptide in normal cells as compared to cancer cells. In particular embodiments, the regulatory element is a binding site for a microRNA that has greater expression in normal cells than cancer cells (e.g., a miR-122 binding site), wherein binding of the microRNA to the binding site inhibits expression of the polypeptide. In particular embodiments, the cell is contacted with a nanoparticle composition comprising an mRNA comprising a region encoding the polypeptide and a microRNA binding site. Upon contacting the cell with the nanoparticle composition or the isolated mRNA, the mRNA may be taken up and translated in the cell to produce the polypeptide. Expression of the polypeptide is greater in cancer cells than normal cells, resulting in greater induction of immunogenic cell death of cancer cells than normal cells.

[1320] In general, the step of contacting a mammalian cell with a composition (e.g., an isolated mRNA, nanoparticle, or pharmaceutical composition of the invention) may be performed in vivo, ex vivo, in culture, or in vitro. In exemplary embodiments of the invention, the step of contacting a mammalian cell with a composition (e.g., an isolated mRNA, nanoparticle, or pharmaceutical composition of the invention) is performed in vivo or ex vivo. The amount of the composition contacted with a cell, and/or the amount of mRNA therein, may depend on the type of cell or tissue being contacted, the means of administration, the physiochemical characteristics of the composition and the mRNA (e.g., size, charge, and chemical composition) therein, and other factors. In general, an effective amount of the composition will allow for efficient production of the encoded polypeptide in the cell. Metrics for efficiency may include polypeptide translation (indicated by polypeptide expression), level of mRNA degradation, and immune response indicators.

[1321] The step of contacting a composition including an mRNA, or an isolated mRNA, with a cell may involve or cause transfection. In some embodiments, a phospholipid included in a lipid nanoparticle may facilitate transfection and/or increase transfection efficiency, for example, by interacting and/or fusing with a cellular or intracellular membrane. Transfection may allow for the translation of the mRNA within the cell.

The ability of a composition of the invention (e.g., a lipid nanoparticle or isolated mRNA) to induce immunogenic cell death may be readily determined, for example by comparing the ability of the composition to induce immunogenic cell death as compared to known agents or manipulations that may induce immunogenic cell death, including but not limited to: engagement of TNFR, TLR or TCR receptors, DNA damage or viral infection. A variety of methods of determining whether an agent can induce immunogenic cell death are known in the art, for example, stains and dyes (e.g., CELLTOX™, MITOTRACKER® Red, propidium iodide, and YOYO3), cell viability assays, and assays (e.g., ELISAs) detecting release of DAMPs (“damage associated molecular patterns”), including release of ATP, HMGB1, IL-1a, uric acid, DNA fragments and/or mitochondrial contents.

### Prophylactic and Therapeutic Methods

[1322] The methods of the disclosure for enhancing an immune response to an antigen(s) of interest in a subject can be used in a variety of clinical, prophylactic or therapeutic applications. For example, the methods can be used to stimulate anti-tumor immunity in a subject with a tumor or in a subject at risk of a tumor (e.g., potentially exposed to an oncogenic virus, such as HPV). Furthermore, the methods can be used to stimulate anti-pathogen immunity in a subject, such as to treat a subject suffering from a pathogenic infection or to provide protective immunity to the subject against the pathogen (e.g., vaccination against the pathogen) prior to exposure to the pathogen.

[1323] Accordingly, in one aspect, the disclosure pertains to a method of stimulating an immunogenic response to a tumor or tumor antigen in a subject in need thereof, the method comprising administering to the subject a composition of the disclosure (or lipid nanoparticle thereof, or pharmaceutical composition thereof) comprising at least one mRNA construct encoding: (i) at least one tumor antigen of interest and (ii) a polypeptide that enhances an immune response against the tumor antigen(s) of interest, such that an immune response to the tumor antigen(s) of interest is enhanced. Suitable tumor antigens of interest include those described herein (e.g. tumor neoantigens, including mutant KRAS antigens; oncogenic viral antigens, including HPV antigens). In one embodiment of the method, the subject is administered a mutant KRAS antigen-STING mRNA construct encoding a sequence shown in any of SEQ ID NOs: 107-130.

[1324] The disclosure also provides methods of treating or preventing a cancer in a subject in need thereof that involve providing or administering at least one mRNA composition described herein (i.e., an immune potentiator mRNA and an antigen-encoding mRNA, in the same or separate mRNA constructs) to the subject. In related embodiments, the subject is provided with or administered a nanoparticle (e.g., a lipid nanoparticle) comprising the mRNA(s). In further related embodiments, the subject is provided with or administered a pharmaceutical composition of the disclosure to the subject. In particular embodiments, the pharmaceutical composition comprises an mRNA(s) encoding an antigen and an immunostimulatory polypeptide as described herein, or it comprises a nanoparticle comprising the mRNA(s). In particular embodiments, the mRNA(s) is present in a nanoparticle, e.g., a lipid nanoparticle. In particular embodiments, the mRNA(s) or nanoparticle is present in a pharmaceutical composition.

[1325] In certain embodiments, the subject in need thereof has been diagnosed with a cancer, or is considered to be at risk of developing a cancer. In some embodiments, the cancer is liver cancer, colorectal cancer, a melanoma cancer, a pancreatic cancer, a NSCLC, a cervical cancer or a head or neck cancer. In particular embodiments, the liver cancer is hepatocellular carcinoma. In some embodiments, the colorectal cancer is a primary tumor or a metastasis. In some embodiments, the cancer is a hematopoetic cancer. In some embodiments, the cancer is an acute myeloid leukemia, a chronic myeloid leukemia, a chronic myelomonocytic leukemia, a myelodystrophic syndrome (including refractory anemias and refractory cytopenias) or a myeloproliferative neoplasm or disease (including polycythemia vera, essential thrombocytosis and primary myelofibrosis). In other embodiments, the cancer is a blood-based cancer or a hematopoetic cancer. In yet other embodiments, the cancer is an HPV-associated cancer, such as cervical, penile, vaginal, vulval, anal and/or oropharyngeal cancer.

[1326] Selectivity for a particular cancer type can be achieved through the combination of use of an appropriate LNP formulation (e.g., targeting specific cell types) in combination with appropriate regulatory site(s) (e.g., microRNAs) engineered into the mRNA constructs.

[1327] In some embodiments, the mRNA(s), nanoparticle, or pharmaceutical composition is administered to the patient parenterally. In particular embodiments, the subject is a mammal, e.g., a human. In various embodiments, the subject is provided with an effective amount of the mRNA(s).

[1328] The methods of treating cancer can further include treatment of the subject with additional agents that enhance an anti-tumor response in the subject and/or that are cytotoxic to the tumor (e.g., chemotherapeutic agents). Suitable therapeutic agents for use in combination therapy include small molecule chemotherapeutic agents, including protein tyrosine kinase inhibitors, as well as biological anti-cancer agents, such as anti-cancer antibodies, including but not limited to those discussed further below. Combination therapy can include administering to the subject an immune checkpoint inhibitor to enhance anti-tumor immunity, such as PD-1 inhibitors, PD-L1 inhibitors and CTLA-4 inhibitors. Other modulators of immune checkpoints may target OX-40, OX-40L or ICOS. In one embodiment, an agent that modulates an immune checkpoint is an antibody. In another embodiment, an agent that modulates an immune checkpoint is a protein or small molecule modulator. In another embodiment, the agent (such as an mRNA) encodes an antibody modulator of an immune checkpoint. Non-limiting examples of immune checkpoint inhibitors that can be used in combination therapy include pembrolizumab, alemtuzumab, nivolumab, pidilizumab, ofatumumab, rituximab, MEDI0680 and PDR001, AMP-224, PF-06801591, BGB-A317, REGN2810, SHR-1210, TSR-042, affimer, avelumab (MSB0010718C), atezolizumab (MPDL3280A), durvalumab (MEDI4736), BMS936559, ipilimumab, tremelimumab, AGEN1884, MEDI6469 and MOXR0916.

[1329] In one embodiment, the invention provides a method of preventing or treating an HPV-associated cancer in a subject in need thereof, the method comprising administering to the subject a composition of the disclosure (or lipid nanoparticle thereof, or pharmaceutical composition thereof) comprising at least one mRNA construct encoding: (i) at least one HPV antigen of interest and (ii) a polypeptide that enhances an immune response against the HPV antigen(s) of interest, such that an immune response to the HPV antigen(s) of interest is enhanced. In various embodiments, the HPV-associated cancer is cervical, penile, vaginal, vulval, anal and/or oropharyngeal cancer. In certain embodiments, the HPV antigen(s) encoded by the mRNA construct(s) is at least one E6 antigen, at least one E7 antigen or both at least one E6 antigen and at least one E7 antigen. In one embodiment, the E6 antigen(s) and/or the E7 antigen(s) are soluble. In another embodiment, the E6 antigen(s) and/or the E7 antigen(s) are intracellular. In one embodiment, the polypeptide that enhances an immune response against the HPV antigen(s) of interest is a STING polypeptide (e.g., a constitutively active STING polypeptide). In one embodiment, the HPV antigen(s) and the STING polypeptide are encoded on different mRNAs and are coformulated in a lipid nanoparticle prior to coadministration to the subject. In another embodiment, the HPV antigen(s) and the STING polypeptide are encoded on the same mRNA. In one embodiment, the composition encoding the HPV antigen(s) and the immune potentiator is administered to a subject at risk of exposure to HPV, to thereby provide prophylactic protection against HPV infection and development of an HPV-associated cancer(s). In another embodiment, the composition encoding the HPV antigen(s) and the immune potentiator is administered to a subject infected with HPV and/or having an HPV-associated cancer, to thereby provide therapeutic activity against HPV by enhancing an immune response against HPV in the subject. In certain embodiments, a subject with an HPV-associated cancer is also treated with an immune checkpoint inhibitor (e.g., anti-CTLA-4, anti-PD-1, anti-PD-L1 or the like), in combination with the treatment with the HPV+immune potentiator vaccine.

[1330] In another aspect, the disclosure pertains to a method of stimulating an immunogenic response to a pathogen in a subject in need thereof, the method comprising administering to the subject a composition of the disclosure (or lipid nanoparticle thereof, or pharmaceutical composition thereof) comprising at least one mRNA construct encoding: (i) at least one pathogen antigen of interest and (ii) a polypeptide that enhances an immune response against the pathogen antigen(s) of interest, such that an immune response to the pathogen antigen(s) of interest is enhanced. In one embodiment, the at least one pathogen antigen is from a pathogen selected from the group consisting of viruses, bacteria, protozoa, fungi and parasites.

[1331] Suitable pathogen antigens of interest include those described herein. In one embodiment, the pathogen antigen(s) is a viral antigen(s). In one embodiment, the pathogen antigen(s) is a human papillomavirus (HPV) antigen, such as an E6 antigen (e.g., comprising an amino acid sequence as shown in any of SEQ ID NOs: 36-72) or a E7 antigen (e.g. comprising an amino acid sequence as shown in any of SEQ ID NOs: 73-94). In one embodiment, the pathogen antigen(s) is a bacterial antigen(s), such as a multivalent bacterial antigen.

[1332] In one embodiment of the method of stimulating an immunogenic response to a pathogen antigen(s) in a subject in need thereof, the mRNA construct(s), lipid nanoparticle or pharmaceutical composition is administered to the subject parenterally. In one embodiment, the mRNA(s), lipid nanoparticle or pharmaceutical composition is administered by once weekly infusion.

[1333] A pharmaceutical composition including one or more mRNAs of the disclosure may be administered to a subject by any suitable route. In some embodiments, compositions of the disclosure are administered by one or more of a variety of routes, including parenteral (e.g., subcutaneous, intracutaneous, intravenous, intraperitoneal, intramuscular, intraarticular, intraarterial, intrasynovial, intrasternal, intrathecal, intralesional, or intracranial injection, as well as any suitable infusion technique), oral, trans- or intra-dermal, interdermal, rectal, intravaginal, topical (e.g. by powders, ointments, creams, gels, lotions, and/or drops), mucosal, nasal, buccal, enteral, vitreal, intratumoral, sublingual, intranasal; by intratracheal instillation, bronchial instillation, and/or inhalation; as an oral spray and/or powder, nasal spray, and/or aerosol, and/or through a portal vein catheter. In some embodiments, a composition may be administered intravenously, intramuscularly, intradermally, intra-arterially, intratumorally, subcutaneously, or by inhalation. In some embodiments, a composition is administered intramuscularly. However, the present disclosure encompasses the delivery of compositions of the disclosure by any appropriate route taking into consideration likely advances in the sciences of drug delivery. In general, the most appropriate route of administration will depend upon a variety of factors including the nature of the pharmaceutical composition including one or more mRNAs (e.g., its stability in various bodily environments such as the bloodstream and gastrointestinal tract), and the condition of the patient (e.g., whether the patient is able to tolerate particular routes of administration).

[1334] In certain embodiments, compositions of the disclosure may be administered at dosage levels sufficient to deliver from about 0.0001 mg/kg to about 10 mg/kg, from about 0.001 mg/kg to about 10 mg/kg, from about 0.005 mg/kg to about 10 mg/kg, from about 0.01 mg/kg to about 10 mg/kg, from about 0.1 mg/kg to about 10 mg/kg, from about 1 mg/kg to about 10 mg/kg, from about 2 mg/kg to about 10 mg/kg, from about 5 mg/kg to about 10 mg/kg, from about 0.0001 mg/kg to about 5 mg/kg, from about 0.001 mg/kg to about 5 mg/kg, from about 0.005 mg/kg to about 5 mg/kg, from about 0.01 mg/kg to about 5 mg/kg, from about 0.1 mg/kg to about 10 mg/kg, from about 1 mg/kg to about 5 mg/kg, from about 2 mg/kg to about 5 mg/kg, from about 0.0001 mg/kg to about 1 mg/kg, from about 0.001 mg/kg to about 1 mg/kg, from about 0.005 mg/kg to about 1 mg/kg, from about 0.01 mg/kg to about 1 mg/kg, or from about 0.1 mg/kg to about 1 mg/kg in a given dose, where a dose of 1 mg/kg provides 1 mg of mRNA or nanoparticle per 1 kg of subject body weight. In particular embodiments, a dose of about 0.005 mg/kg to about 5 mg/kg of mRNA or nanoparticle of the disclosure may be administrated.

[1335] In some embodiments, a composition of the disclosure comprising both an immune potentiator mRNA construct (e.g., STING construct) and an antigen construct (e.g., vaccine construct) is formulated such that it is optimized as a function of a fixed dosage of the immune potentiator construct. Non-limiting examples of a fixed dosage of the immune potentiator construct include 0.001 mg/kg, 0.005 mg/kg, 0.01 mg/kg, 0.05 mg/kg, 0.1 mg/kg, 1 mg/kg, 2 mg/kg, 3 mg/kg, 4 mg/kg, 5 mg/kg, 6 mg/kg, 7 mg/kg, 8 mg/kg, 9 mg/kg, 10 mg/kg, 0.0001 mg/kg to 10 mg/kg, 0.001 mg/kg to 10 mg/kg, 0.005 mg/kg to 10 mg/kg, 0.01 mg/kg to 10 mg/kg, 0.1 mg/kg to 10 mg/kg, 1 mg/kg to 10 mg/kg, 2 mg/kg to 10 mg/kg, 5 mg/kg to 10 mg/kg, 0.0001 mg/kg to 5 mg/kg, 0.001 mg/kg to 5 mg/kg, 0.005 mg/kg to 5 mg/kg, 0.01 mg/kg to 5 mg/kg, 0.1 mg/kg to 10 mg/kg, 1 mg/kg to 5 mg/kg, 2 mg/kg to 5 mg/kg, 0.0001 mg/kg to 1 mg/kg, 0.001 mg/kg to 1 mg/kg, 0.005 mg/kg to 1 mg/kg, 0.01 mg/kg to 1 mg/kg, or 0.1 mg/kg to 1 mg/kg in a given dose, where a dose of 1 mg/kg provides 1 mg of mRNA per 1 kg of subject body weight.

[1336] In another embodiment, a composition of the disclosure comprising both an immune potentiator mRNA construct (e.g., STING construct) and an antigen construct (e.g., vaccine construct) is formulated such that it is optimized as a function of a fixed dosage of the antigen construct. Non-limiting examples of a fixed dosage of the antigen construct include 0.001 mg/kg, 0.005 mg/kg, 0.01 mg/kg, 0.05 mg/kg, 0.1 mg/kg, 1 mg/kg, 2 mg/kg, 3 mg/kg, 4 mg/kg, 5 mg/kg, 6 mg/kg, 7 mg/kg, 8 mg/kg, 9 mg/kg, 10 mg/kg, 0.0001 mg/kg to 10 mg/kg, 0.001 mg/kg to 10 mg/kg, 0.005 mg/kg to 10 mg/kg, 0.01 mg/kg to 10 mg/kg, 0.1 mg/kg to 10 mg/kg, 1 mg/kg to 10 mg/kg, 2 mg/kg to 10 mg/kg, 5 mg/kg to 10 mg/kg, 0.0001 mg/kg to 5 mg/kg, 0.001 mg/kg to 5 mg/kg, 0.005 mg/kg to 5 mg/kg, 0.01 mg/kg to 5 mg/kg, 0.1 mg/kg to 10 mg/kg, 1 mg/kg to 5 mg/kg, 2 mg/kg to 5 mg/kg, 0.0001 mg/kg to 1 mg/kg, 0.001 mg/kg to 1 mg/kg, 0.005 mg/kg to 1 mg/kg, 0.01 mg/kg to 1 mg/kg, or 0.1 mg/kg to 1 mg/kg in a given dose, where a dose of 1 mg/kg provides 1 mg of mRNA per 1 kg of subject body weight.

[1337] In some embodiments the dosage of the RNA polynucleotide (immune potentiator RNA polynucleotide, antigen-encoding RNA polynucleotide, or both) in the immunomodulatory therapeutic composition is 1-5 μg, 5-10 μg, 10-15 μg, 15-20 μg, 10-25 μg, 20-25 μg, 20-50 μg, 30-50 μg, 40-50 μg, 40-60 μg, 60-80 μg, 60-100 μg, 50-100 μg, 80-120 μg, 40-120 μg, 40-150 μg, 50-150 μg, 50-200 μg, 80-200 μg, 100-200 μg, 100-300 μg, 120-250 μg, 150-250 μg, 180-280 μg, 200-300 μg, 30-300 μg, 50-300 μg, 80-300 μg, 100-300 μg, 40-300 μg, 50-350 μg, 100-350 μg, 200-350 μg, 300-350 μg, 320-400 μg, 40-380 μg, 40-100 μg, 100-400 μg, 200-400 μg, or 300-400 μg per dose. In some embodiments, the immunomodulatory therapeutic composition is administered to the subject by intradermal or intramuscular injection. In some embodiments, the immunomodulatory therapeutic composition is administered to the subject on day zero. In some embodiments, a second dose of the immunomodulatory therapeutic composition is administered to the subject on day seven, or day fourteen or day twenty one.

[1338] In some embodiments, a dosage of 25 micrograms of the RNA polynucleotide is included in the immunomodulatory therapeutic composition administered to the subject. In some embodiments, a dosage of 10 micrograms of the RNA polynucleotide is included in the immunomodulatory therapeutic composition administered to the subject. In some embodiments, a dosage of 30 micrograms of the RNA polynucleotide is included in the immunomodulatory therapeutic composition administered to the subject. In some embodiments, a dosage of 100 micrograms of the RNA polynucleotide is included in the immunomodulatory therapeutic composition administered to the subject. In some embodiments, a dosage of 50 micrograms of the RNA polynucleotide is included in the immunomodulatory therapeutic composition administered to the subject. In some embodiments, a dosage of 75 micrograms of the RNA polynucleotide is included in the immunomodulatory therapeutic composition administered to the subject. In some embodiments, a dosage of 150 micrograms of the RNA polynucleotide is included in the immunomodulatory therapeutic composition administered to the subject. In some embodiments, a dosage of 400 micrograms of the RNA polynucleotide is included in the immunomodulatory therapeutic composition administered to the subject. In some embodiments, a dosage of 300 micrograms of the RNA polynucleotide is included in the immunomodulatory therapeutic composition administered to the subject. In some embodiments, a dosage of 200 micrograms of the RNA polynucleotide is included in the immunomodulatory therapeutic composition administered to the subject. In some embodiments, the RNA polynucleotide accumulates at a 100 fold higher level in the local lymph node in comparison with the distal lymph node. In other embodiments the immunomodulatory therapeutic composition is chemically modified and in other embodiments the immunomodulatory therapeutic composition is not chemically modified.

[1339] In some embodiments, the effective amount is a total dose of 1-100 μg. In some embodiments, the effective amount is a total dose of 100 μg. In some embodiments, the effective amount is a dose of 25 μg administered to the subject a total of one or two times. In some embodiments, the effective amount is a dose of 100 μg administered to the subject a total of two times. In some embodiments, the effective amount is a dose of 1 μg-10 μg, 1 μg-20 μg, 1 μg-30 μg, 5 μg-10 μg, 5 μg-20 μg, 5 μg-30 μg, 5 μg-40 μg, 5 μg-50 μg, 10 μg-15 μg, 10 μg-20 μg, 10 μg-25 μg, 10 μg-30 μg, 10 μg-40 μg, 10 μg-50 μg, 10 μg-60 μg, 15 μg-20 μg, 15 μg-25 μg, 15 μg-30 μg, 15 μg-40 μg, 15 μg-50 μg, 20 μg-25 μg, 20 μg-30 μg, 20 μg-40 μg 20 μg-50 μg, 20 μg-60 μg, 20 μg-70 μg, 20 μg-75 μg, 30 μg-35 μg, 30 μg-40 μg, 30 μg-45 μg 30 μg-50 μg, 30 μg-60 μg, 30 μg-70 μg, 30 μg-75 μg which may be administered to the subject a total of one or two times or more.

[1340] A dose may be administered one or more times per day, in the same or a different amount, to obtain a desired level of mRNA expression and/or effect (e.g., a therapeutic effect). The desired dosage may be delivered, for example, three times a day, two times a day, once a day, every other day, every third day, every week, every two weeks, every three weeks, or every four weeks. In certain embodiments, the desired dosage may be delivered using multiple administrations (e.g., two, three, four, five, six, seven, eight, nine, ten, eleven, twelve, thirteen, fourteen, or more administrations). For example, in certain embodiments, a composition of the disclosure comprising both an immune potentiator mRNA construct (e.g., STING construct) and an antigen construct (e.g., vaccine construct) is administered at least two times wherein the second dose is administered at least one day, or at least 3 days, or least 7 days, or at least 10 days, or at least 14 days, or at least 21 days, or at least 28 days, or at least 35 days, or at least 42 days or at least 48 days after the first dose is administered. In certain embodiments, a first and second dose are administered on days 0 and 2, respectively, or on days 0 and 7 respectively, or on days 0 and 14, respectively, or on days 0 and 21, respectively, or on days 0 and 48, respectively. Additional doses (i.e., third doses, fourth doses, etc.) can be administered on the same or a different schedule on which the first two doses were administered. For example, in some embodiments, the first and second dosages are administered 7 days apart and then one or more additional doses are administered weekly thereafter. In another embodiment, the first and second dosages are administered 7 days apart and then one or more additional doses are administered every two weeks thereafter.

[1341] In some embodiments, a single dose may be administered, for example, prior to or after a surgical procedure or in the instance of an acute disease, disorder, or condition. The specific therapeutically effective, prophylactically effective, or otherwise appropriate dose level for any particular patient will depend upon a variety of factors including the severity and identify of a disorder being treated, if any; the one or more mRNAs employed; the specific composition employed; the age, body weight, general health, sex, and diet of the patient; the time of administration, route of administration, and rate of excretion of the specific pharmaceutical composition employed; the duration of the treatment; drugs used in combination or coincidental with the specific pharmaceutical composition employed; and like factors well known in the medical arts.

[1342] In some embodiments, a pharmaceutical composition of the disclosure may be administered in combination with another agent, for example, another therapeutic agent, a prophylactic agent, and/or a diagnostic agent. By “in combination with,” it is not intended to imply that the agents must be administered at the same time and/or formulated for delivery together, although these methods of delivery are within the scope of the present disclosure. For example, one or more compositions including one or more different mRNAs may be administered in combination. Compositions can be administered concurrently with, prior to, or subsequent to, one or more other desired therapeutics or medical procedures. In general, each agent will be administered at a dose and/or on a time schedule determined for that agent. In some embodiments, the present disclosure encompasses the delivery of compositions of the disclosure, or imaging, diagnostic, or prophylactic compositions thereof in combination with agents that improve their bioavailability, reduce and/or modify their metabolism, inhibit their excretion, and/or modify their distribution within the body.

[1343] Exemplary therapeutic agents that may be administered in combination with the compositions of the disclosure include, but are not limited to, cytotoxic, chemotherapeutic, and other therapeutic agents. Cytotoxic agents may include, for example, taxol, cytochalasin B, gramicidin D, ethidium bromide, emetine, mitomycin, etoposide, teniposide, vincristine, vinblastine, colchicine, doxorubicin, daunorubicin, dihydroxyanthracinedione, mitoxantrone, mithramycin, actinomycin D, 1-dehydrotestosterone, glucocorticoids, procaine, tetracaine, lidocaine, propranolol, puromycin, maytansinoids, rachelmycin, and analogs thereof. Radioactive ions may also be used as therapeutic agents and may include, for example, radioactive iodine, strontium, phosphorous, palladium, cesium, iridium, cobalt, yttrium, samarium, and praseodymium. Other therapeutic agents may include, for example, antimetabolites (e.g., methotrexate, 6-mercaptopurine, 6-thioguanine, cytarabine, and 5-fluorouracil, and decarbazine), alkylating agents (e.g., mechlorethamine, thiotepa, chlorambucil, rachelmycin, melphalan, carmustine, lomustine, cyclophosphamide, busulfan, dibromomannitol, streptozotocin, mitomycin C, and cis-dichlorodiamine platinum (II) (DDP), and cisplatin), anthracyclines (e.g., daunorubicin and doxorubicin), antibiotics (e.g., dactinomycin, bleomycin, mithramycin, and anthramycin), and anti-mitotic agents (e.g., vincristine, vinblastine, taxol, and maytansinoids).

[1344] The particular combination of therapies (therapeutics or procedures) to employ in a combination regimen will take into account compatibility of the desired therapeutics and/or procedures and the desired therapeutic effect to be achieved. It will also be appreciated that the therapies employed may achieve a desired effect for the same disorder (for example, a composition useful for treating cancer may be administered concurrently with a chemotherapeutic agent), or they may achieve different effects (e.g., control of any adverse effects).

[1345] Immune checkpoint inhibitors such as pembrolizumab or nivolumab, which target the interaction between programmed death receptor 1/programmed death ligand 1 (PD-1/PD-L1) and PD-L2, have been recently approved for the treatment of various malignancies and are currently being investigated in clinical trials for various cancers including melanoma, head and neck squamous cell carcinoma (HNSCC).

[1346] Accordingly, one aspect of the disclosure relates to combination therapy in which a subject is previously treated with a PD-1 antagonist prior to administration of a lipid nanoparticle or composition of the present disclosure. In another aspect, the subject has been treated with a monoclonal antibody that binds to PD-1 prior to administration of a lipid nanoparticle or composition of the present disclosure. In another aspect, the subject has been administered a lipid nanoparticle or composition of the disclosure prior to treatment with an anti-PD-1 monoclonal antibody therapy. In some aspects, the anti-PD-1 monoclonal antibody therapy comprises nivolumab, pembrolizumab, pidilizumab, or any combination thereof.

[1347] In another aspect, the subject has been treated with a monoclonal antibody that binds to PD-L1 prior to administration of a lipid nanoparticle or composition of the present disclosure. In another aspect, the subject is administered a lipid nanoparticle or composition prior to treatment with an anti-PD-L1 monoclonal antibody therapy. In some aspects, the anti-PD-L1 monoclonal antibody therapy comprises durvalumab, avelumab, MEDI473, BMS-936559, aezolizumab, or any combination thereof.

[1348] In some aspects, the subject has been treated with a CTLA-4 antagonist prior to treatment with the compositions of present disclosure. In another aspect, the subject has been previously treated with a monoclonal antibody that binds to CTLA-4 prior to administration of a lipid nanoparticle or composition of the present disclosure. In some aspects, the subject has been administered a lipid nanoparticle or composition prior to treatment with an anti-CTLA-4 monoclonal antibody. In some aspects, the anti-CTLA-4 antibody therapy comprises ipilimumab or tremelimumab.

[1349] In any of the foregoing or related aspects, the disclosure provides a lipid nanoparticle, and an optional pharmaceutically acceptable carrier, or a pharmaceutical composition for use in treating or delaying progression of cancer in an individual, wherein the treatment comprises administration of the composition in combination with a second composition, wherein the second composition comprises a checkpoint inhibitor polypeptide and an optional pharmaceutically acceptable carrier.

[1350] In any of the foregoing or related aspects, the disclosure provides use of a lipid nanoparticle, and an optional pharmaceutically acceptable carrier, in the manufacture of a medicament for treating or delaying progression of cancer in an individual, wherein the medicament comprises the lipid nanoparticle and an optional pharmaceutically acceptable carrier and wherein the treatment comprises administration of the medicament in combination with a composition comprising a checkpoint inhibitor polypeptide and an optional pharmaceutically acceptable carrier.

[1351] In any of the foregoing or related aspects, the disclosure provides a kit comprising a container comprising a lipid nanoparticle, and an optional pharmaceutically acceptable carrier, or a pharmaceutical composition, and a package insert comprising instructions for administration of the lipid nanoparticle or pharmaceutical composition for treating or delaying progression of cancer in an individual. In some aspects, the package insert further comprises instructions for administration of the lipid nanoparticle or pharmaceutical composition in combination with a composition comprising a checkpoint inhibitor polypeptide and an optional pharmaceutically acceptable carrier for treating or delaying progression of cancer in an individual.

[1352] In any of the foregoing or related aspects, the disclosure provides a kit comprising a medicament comprising a lipid nanoparticle, and an optional pharmaceutically acceptable carrier, or a pharmaceutical composition, and a package insert comprising instructions for administration of the medicament alone or in combination with a composition comprising a checkpoint inhibitor polypeptide and an optional pharmaceutically acceptable carrier for treating or delaying progression of cancer in an individual. In some aspects, the kit further comprises a package insert comprising instructions for administration of the first medicament prior to, current with, or subsequent to administration of the second medicament for treating or delaying progression of cancer in an individual.

[1353] In any of the foregoing or related aspects, the disclosure provides a lipid nanoparticle, a composition, or the use thereof, or a kit comprising a lipid nanoparticle or a composition as described herein, wherein the checkpoint inhibitor polypeptide inhibits PD1, PD-L1, CTLA4, or a combination thereof. In some aspects, the checkpoint inhibitor polypeptide is an antibody. In some aspects, the checkpoint inhibitor polypeptide is an antibody selected from an anti-CTLA4 antibody or antigen-binding fragment thereof that specifically binds CTLA4, an anti-PD1 antibody or antigen-binding fragment thereof that specifically binds PD1, an anti-PD-L1 antibody or antigen-binding fragment thereof that specifically binds PD-L1, and a combination thereof. In some aspects, the checkpoint inhibitor polypeptide is an anti-PD-L1 antibody selected from atezolizumab, avelumab, or durvalumab. In some aspects, the checkpoint inhibitor polypeptide is an anti-CTLA-4 antibody selected from tremelimumab or ipilimumab. In some aspects, the checkpoint inhibitor polypeptide is an anti-PD1 antibody selected from nivolumab or pembrolizumab.

[1354] In related aspects, the disclosure provides a method of reducing or decreasing a size of a tumor or inhibiting a tumor growth in a subject in need thereof comprising administering to the subject any of the foregoing or related lipid nanoparticles of the disclosure, or any of the foregoing or related compositions of the disclosure.

[1355] In related aspects, the disclosure provides a method inducing an anti-tumor response in a subject with cancer comprising administering to the subject any of the foregoing or related lipid nanoparticles of the disclosure, or any of the foregoing or related compositions of the disclosure. In some aspects, the anti-tumor response comprises a T-cell response. In some aspects, the T-cell response comprises CD8+ T cells.

[1356] In some aspects of the foregoing methods, the method further comprises administering a second composition comprising a checkpoint inhibitor polypeptide, and an optional pharmaceutically acceptable carrier. In some aspects, the checkpoint inhibitor polypeptide inhibits PD1, PD-L1, CTLA4, or a combination thereof. In some aspects, the checkpoint inhibitor polypeptide is an antibody. In some aspects, the checkpoint inhibitor polypeptide is an antibody selected from an anti-CTLA4 antibody or antigen-binding fragment thereof that specifically binds CTLA4, an anti-PD1 antibody or antigen-binding fragment thereof that specifically binds PD1, an anti-PD-L1 antibody or antigen-binding fragment thereof that specifically binds PD-L1, and a combination thereof. In some aspects, the checkpoint inhibitor polypeptide is an anti-PD-L1 antibody selected from atezolizumab, avelumab, or durvalumab. In some aspects, the checkpoint inhibitor polypeptide is an anti-CTLA-4 antibody selected from tremelimumab or ipilimumab. In some aspects, the checkpoint inhibitor polypeptide is an anti-PD1 antibody selected from nivolumab or pembrolizumab.

[1357] In some aspects of any of the foregoing or related methods, the composition comprising the checkpoint inhibitor polypeptide is administered by intravenous injection. In some aspects, the composition comprising the checkpoint inhibitor polypeptide is administered once every 2 to 3 weeks. In some aspects, the composition comprising the checkpoint inhibitor polypeptide is administered once every 2 weeks or once every 3 weeks. In some aspects, the composition comprising the checkpoint inhibitor polypeptide is administered prior to, concurrent with, or subsequent to administration of the lipid nanoparticle or pharmaceutical composition thereof.

[1358] In any of the foregoing or related aspects, the disclosure provides pharmaceutical composition comprising the lipid nanoparticle, and a pharmaceutically acceptable carrier. In some aspects, the pharmaceutical composition is formulated for intramuscular delivery.

### Therapeutic Methods for Inducing Immunogenic Cell Death

[1359] The invention provides a method of stimulating an immunogenic response to a tumor in a subject in need thereof, e.g., a human subject. In one embodiment, the method comprises administering to the subject an effective amount of an mRNA of the invention encoding a polypeptide that induces immunogenic cell death such that an immunogenic response to the tumor is stimulated in the subject. In another embodiment, the method comprises administering to the subject an effective amount of a lipid nanoparticle of the invention comprising an mRNA encoding a polypeptide that induces immunogenic cell death such that an immunogenic response to the tumor is stimulated in the subject. In yet another embodiment, the method comprises administering to the subject a pharmaceutical composition of the invention (e.g., comprising an mRNA or lipid nanoparticle of the invention) such that an immunogenic response to the tumor is stimulated in the subject.

[1360] In various embodiments, the method can comprise administering to the subject one or more additional agents that stimulate an inflammatory and/or immune reaction and/or regulate immunoresponsiveness to thereby further promote or enhance an immunogenic response to the tumor in the subject. Suitable types of agents for use as additional agents are described above. In one embodiment, the subject is administered one additional agent. In another embodiment, the subject is administered two additional agents, which additional agents differ from each other. In yet another embodiment, the subject is administered three additional agents, which additional agents differ from each other.

[1361] In one embodiment, the method further comprises administering to the subject at least one agent that potentiates an immune response, for example, induces adaptive immunity (e.g., by stimulating Type I interferon production), stimulates an inflammatory response, stimulates NFkB signaling and/or stimulates dendritic cell (DC) mobilization. In one embodiment, the method further comprises administering to the subject at least one agent that induces adaptive immunity. In one embodiment, the agent that induces adaptive immunity is Type I interferon (e.g., a pharmaceutical composition comprising Type I interferon). In another embodiment, the agent that induces adaptive immunity stimulates Type I interferon. Non-limiting examples of agents (e.g., mRNA constructs) that stimulate adaptive immunity include STING, IRF1, IRF3, IRF5, IRF6, IRF7 and IRF8. In another embodiment, the agent stimulates an inflammatory response. Non-limiting examples of agents (e.g., mRNA constructs) that stimulate an inflammatory response include STAT1, STAT2, STAT4, STAT6, NFAT and C/EBPb. In another embodiment, the agent stimulates NFκB signaling. Non-limiting examples of agents (e.g. mRNA constructs) that stimulate NFκB signaling include IKKβ, c-FLIP, RIPK1, IL-27, ApoF and PLP. In another embodiment, the agent stimulates DC mobilization. A non-limiting example of an agent that stimulates DC mobilization is FLT3. In yet another embodiment, the agent that potentiates immune reponses is DIABLO (SMAC/DIABLO) (e.g, a DIABLO mRNA construct).

[1362] In another embodiment, the method further comprises administering to the subject at least one agent that induces T cell activation or priming. In one embodiment, the agent that induces T cell activation or priming is a cytokine or chemokine. Non-limiting examples of cytokines or chemokines that induce T cell activation or priming include IL-12, IL36g, CCL2, CCL4, CCL20 and CCL21. In one embodiment, the agent that induces T cell activation or priming is a pharmaceutical composition comprising IL-12, IL36g, CCL2, CCL4, CCL20 or CCL21. In another embodiment, the agent that induces T cell activation or priming is an agent (e.g., mRNA construct) that encodes IL-12, IL36g, CCL2, CCL4, CCL20 or CCL21. In yet another embodiment, the agent is an mRNA construct encoding a polypeptide that induces the chemokine or cytokine (e.g., induces IL-12, IL36g, CCL2, CCL4, CCL20 or CCL21).

[1363] In another embodiment, the method further comprises administering to the subject at least one agent that modulates an immune checkpoint. In one embodiment, the agent that modulates an immune checkpoint is an antibody. In another embodiment, the agent that modulates an immune checkpoint is an agent (e.g., mRNA construct) that encodes an antibody. In one embodiment, the agent that modulates an immune checkpoint is a CTLA-4 inhibitor, non-limiting examples of which include ipilimumab, tremelimumab and AGEN1884. In another embodiment, the agent that modulates an immune checkpoint is a PD-1 inhibitor, non-limiting examples of which include pembrolizumab, alemtuzumab, atezolizumab, nivolumab, ipilimumab, pidilizumab, ofatumumab, rituximab, MEDI0680 and PDR001, AMP-224, PF-06801591, BGB-A317, REGN2810, SHR-1210, TSR-042, avelumab, durvalumab and affimer. In another embodiment, the agent that modulates an immune checkpoint is a PD-L1 inhibitor, non-limiting examples of which include atezolizumab, avelumab, durvalumab and BMS936559. In yet another embodiment, the agent that modulates an immune checkpoint modulates the activity of OX-40 or OX-40L, non-limiting examples of which include Fc-OX-40L, MEDI6469 (agonist anti-OX40 antibody) and MOXR0916 (agonist anti-OX40 antibody). In yet another embodiment, the agent that modulates an immune checkpoint modulates the activity of ICOS (e.g., ICOS pathway agonists).

[1364] In one embodiment, in addition to administering the mRNA encoding a polypeptide that induces immunogenic cell death, the method further comprises administering: (i) at least one agent that potentiates an immune response (e.g., induces induces adaptive immunity, stimulates Type I interferon, stimulates an inflammatory response, stimulates NFκB signaling and/or stimulates DC mobilization); and (ii) at least one agent that induces T cell activation or priming. In another embodiment, the method further comprises administering: (i) at least one agent that potentiates an immune response (e.g., induces induces adaptive immunity, stimulates Type I interferon, stimulates an inflammatory response, stimulates NFκB signaling and/or stimulates DC mobilization); and (ii) at least one agent that modulates an immune checkpoint. In another embodiment, the method further comprises administering: (i) at least one agent that induces T cell activation or priming; and (ii) at least one agent that modulates an immune checkpoint. In yet another embodiment, the method further comprises administering to the subject: (i) at least one agent that potentiates an immune response (e.g., induces induces adaptive immunity, stimulates Type I interferon, stimulates an inflammatory response, stimulates NFκB signaling and/or stimulates DC mobilization); (ii) at least one agent that induces T cell activation or priming; and (iii) at least one agent that modulates an immune checkpoint.

[1365] In one embodiment of the method of stimulating an immunogenic response to a tumor in a subject in need thereof, the mRNA construct, lipid nanoparticle or pharmaceutical composition is administered to the subject parenterally. In one embodiment, the mRNA, lipid nanoparticle or pharmaceutical composition is administered by once weekly infusion. In one embodiment, the tumor is a liver cancer, a colorectal cancer or a melanoma cancer cell.

[1366] In another aspect, the invention provides a method for stimulating an immunogenic response to a tumor in a subject in need thereof, the method comprising administering to the subject an effective amount of:

[1367] (i) a first chemically modified messenger RNA (mmRNA) encoding a polypeptide that induces immunogenic cell death, wherein said first mmRNA comprises one or more modified nucleobases;

[1368] and at least one of:

[1369] (ii) a second mmRNA encoding a polypeptide that potentiates an immune response (e.g., induces induces adaptive immunity, stimulates Type I interferon, stimulates an inflammatory response, stimulates NFκB signaling and/or stimulates DC mobilization), wherein said second mmRNA comprises one or more modified nucleobases;

[1370] (iii) a third mmRNA encoding a polypeptide that induces induces T cell activation or priming, wherein said third mmRNA comprises one or more modified nucleobases; and/or

[1371] (iv) a fourth mmRNA encoding a polypeptide that modulates an immune checkpoint, wherein said fourth mmRNA comprises one or more modified nucleobases,

[1372] such that an immunogenic response to the tumor is generated in the subject.

[1373] The first mmRNA, second mmRNA, third mmRNA and/or fourth mmRNA may be present in the same pharmaceutical composition or lipid nanoparticle that is administered to the subject. Alternatively, the first mmRNA, second mmRNA, third mmRNA and/or fourth mmRNA may be present in different pharmaceutical compositions or lipid nanoparticles that are administered to the subject.

[1374] In one embodiment, the first mmRNA and second mmRNA are administered to the subject. In another embodiment, the first mmRNA and third mmRNA are administered to the subject. In another embodiment, the first mmRNA and fourth mmRNA are administered to the subject. In another embodiment, the first mmRNA, second mmRNA and third mmRNA are administered to the subject. In another embodiment, the first mmRNA, second mmRNA and fourth mmRNA are administered to the subject. In another embodiment, the first mmRNA, third mmRNA and fourth mmRNA are administered to the subject. In another embodiment, the first mmRNA, second, third mmRNA and fourth mmRNA are administered to the subject.

[1375] In one embodiment, the polypeptide encoded by the first mmRNA is selected from the group consisting of MLKL, RIPK3, RIPK1, DIABLO, FADD, GSDMD, caspase-4, caspase-5, caspase-11, NLRP3, ASC/CARD and Pyrin. In one embodiment, the polypeptide encoded by the second mmRNA is selected from the group consisting of DIABLO, STING, IRF1, IRF3, IRF5, IRF6, IRF7, IRF8, STAT1, STAT2, STAT4, STAT6, NFAT, C/EBPb, IKKβ, c-FLIP, RIPK1, IL-27, ApoF, PLP and FLT3. In one embodiment, the polypeptide encoded by the second mmRNA is selected from the group consisting of DIABLO, STING, IRF3, IRF7, STAT6, IKKβ, c-FLIP and RIPK1. In one embodiment, the polypeptide encoded by the third mmRNA is selected from the group consisting of IL-12, IL36g, CCL2, CCL4, CCL20 and CCL21. In one embodiment, the polypeptide encoded by the fourth mmRNA is selected from the group consisting of PD-1 inhibitors, PD-L1 inhibitors, CTLA-4 inhibitors, OX-40 agonists, OX-40L and ICOS pathway agonists.

[1376] The invention also provides methods of treating or preventing a cancer in a subject in need thereof that involve providing or administering an mRNA encoding a polypeptide described herein to the subject. In related embodiments, the subject is provided with or administered a nanoparticle (e.g., a lipid nanoparticle) comprising the mRNA. In further related embodiments, the subject is provided with or administered a pharmaceutical composition of the invention to the subject. In particular embodiments, the pharmaceutical composition comprises an mRNA encoding a polypeptide described herein, or it comprises a nanoparticle comprising the mRNA. In particular embodiments, the mRNA is present in a nanoparticle, e.g., a lipid nanoparticle. In particular embodiments, the mRNA or nanoparticle is present in a pharmaceutical composition. In certain embodiments, the subject in need thereof has been diagnosed with a cancer, or is considered to be at risk of developing a cancer. In some embodiments, the cancer is liver cancer, colorectal cancer or a melanoma cancer. In particular embodiments, the liver cancer is hepatocellular carcinoma. In some embodiments, the colorectal cancer is a primary tumor or a metastasis. In some embodiments, the cancer is a hematopoetic cancer. In some embodiments, the cancer is an acute myeloid leukemia, a chronic myeloid leukemia, a chronic myelomonocytic leukemia, a myelodystrophic syndrome (including refractory anemias and refractory cytopenias) or a myeloproliferative neoplasm or disease (including polycythemia vera, essential thrombocytosis and primary myelofibrosis). In other embodiments, the cancer is a blood-based cancer or a hematopoetic cancer. Selectivity for a particular cancer type can be achieved through the combination of use of an appropriate LNP formulation (e.g., targeting specific cell types) in combination with appropriate regulatory site(s) (e.g., microRNAs) engineered into the mRNA constructs.

[1377] In some embodiments, the mRNA, nanoparticle, or pharmaceutical composition is administered to the patient parenterally. In particular embodiments, the subject is a mammal, e.g., a human. In various embodiments, the subject is provided with an effective amount of the mRNA.

[1378] The invention further provides methods of treating or preventing cancer in a subject in need thereof, comprising providing the subject with an effective amount of an mRNA described herein, e.g., an mRNA encoding a polypeptide that induces immunogenic cell death, wherein the mRNA further comprises a regulatory element that enhances expression of the polypeptide in cancer cells as compared to normal cells. In particular embodiments, the regulatory element is a binding site for a microRNA that has greater expression in normal cells than cancer cells (e.g., a miR-122 binding site), wherein binding of the microRNA to the binding site inhibits expression of the polypeptide. In particular embodiments, the mRNA is present in a nanoparticle, e.g., a lipid nanoparticle. In particular embodiments, the mRNA or nanoparticle is present in a pharmaceutical composition. The nanoparticle or the isolated mRNA may be taken up and translated in the subject's cells to produce the polypeptide inducing immunogenic cell death. In particular embodiments, expression of the polypeptide is greater in cancer cells than normal cells, resulting in greater immunogenic cell death of cancer cells than normal cells.

[1379] In certain embodiments, the present invention includes a method of treating or preventing cancer in a subject in need thereof, comprising providing to the subject a first mRNA described herein, e.g., an mRNA encoding a polypeptide that induces immunogenic cell death, in combination with a therapeutic agent, such as a chemotherapeutic drug or other anti-cancer agent. Suitable therapeutic agents for use in combination therapy include small molecule chemotherapeutic agents, including protein tyrosine kinase inhibitors, as well as biological anti-cancer agents, such as anti-cancer antibodies. Other suitable therapeutic agents for use in combination therapy are described further below.

[1380] A pharmaceutical composition including one or more mRNAs of the invention may be administered to a subject by any suitable route. In some embodiments, compositions of the invention are administered by one or more of a variety of routes, including parenteral (e.g., subcutaneous, intracutaneous, intravenous, intraperitoneal, intramuscular, intraarticular, intraarterial, intrasynovial, intrasternal, intrathecal, intralesional, or intracranial injection, as well as any suitable infusion technique), oral, trans- or intra-dermal, interdermal, rectal, intravaginal, topical (e.g. by powders, ointments, creams, gels, lotions, and/or drops), mucosal, nasal, buccal, enteral, vitreal, intratumoral, sublingual, intranasal; by intratracheal instillation, bronchial instillation, and/or inhalation; as an oral spray and/or powder, nasal spray, and/or aerosol, and/or through a portal vein catheter. In some embodiments, a composition may be administered intravenously, intramuscularly, intradermally, intra-arterially, intratumorally, subcutaneously, or by inhalation. However, the present disclosure encompasses the delivery of compositions of the invention by any appropriate route taking into consideration likely advances in the sciences of drug delivery. In general, the most appropriate route of administration will depend upon a variety of factors including the nature of the pharmaceutical composition including one or more mRNAs (e.g., its stability in various bodily environments such as the bloodstream and gastrointestinal tract), and the condition of the patient (e.g., whether the patient is able to tolerate particular routes of administration).

[1381] In certain embodiments, compositions of the invention may be administered at dosage levels sufficient to deliver from about 0.0001 mg/kg to about 10 mg/kg from about 0.001 mg/kg to about 10 mg/kg, from about 0.005 mg/kg to about 10 mg/kg, from about 0.01 mg/kg to about 10 mg/kg, from about 0.1 mg/kg to about 10 mg/kg, from about 1 mg/kg to about 10 mg/kg, from about 2 mg/kg to about 10 mg/kg, from about 5 mg/kg to about 10 mg/kg, from about 0.0001 mg/kg to about 5 mg/kg from about 0.001 mg/kg to about 5 mg/kg, from about 0.005 mg/kg to about 5 mg/kg, from about 0.01 mg/kg to about 5 mg/kg, from about 0.1 mg/kg to about 10 mg/kg, from about 1 mg/kg to about 5 mg/kg, from about 2 mg/kg to about 5 mg/kg, from about 0.0001 mg/kg to about 1 mg/kg, from about 0.001 mg/kg to about 1 mg/kg, from about 0.005 mg/kg to about 1 mg/kg, from about 0.01 mg/kg to about 1 mg/kg, or from about 0.1 mg/kg to about 1 mg/kg in a given dose, where a dose of 1 mg/kg provides 1 mg of mRNA or nanoparticle per 1 kg of subject body weight. In particular embodiments, a dose of about 0.005 mg/kg to about 5 mg/kg of mRNA or nanoparticle of the invention may be administrated.

[1382] A dose may be administered one or more times per day, in the same or a different amount, to obtain a desired level of mRNA expression and/or effect (e.g., a therapeutic effect). The desired dosage may be delivered, for example, three times a day, two times a day, once a day, every other day, every third day, every week, every two weeks, every three weeks, or every four weeks. In certain embodiments, the desired dosage may be delivered using multiple administrations (e.g., two, three, four, five, six, seven, eight, nine, ten, eleven, twelve, thirteen, fourteen, or more administrations). In some embodiments, a single dose may be administered, for example, prior to or after a surgical procedure or in the instance of an acute disease, disorder, or condition. The specific therapeutically effective, prophylactically effective, or otherwise appropriate dose level for any particular patient will depend upon a variety of factors including the severity and identify of a disorder being treated, if any; the one or more mRNAs employed; the specific composition employed; the age, body weight, general health, sex, and diet of the patient; the time of administration, route of administration, and rate of excretion of the specific pharmaceutical composition employed; the duration of the treatment; drugs used in combination or coincidental with the specific pharmaceutical composition employed; and like factors well known in the medical arts.

[1383] In some embodiments, a pharmaceutical composition of the invention may be administered in combination with another agent, for example, another therapeutic agent, a prophylactic agent, and/or a diagnostic agent. By “in combination with,” it is not intended to imply that the agents must be administered at the same time and/or formulated for delivery together, although these methods of delivery are within the scope of the present disclosure. For example, one or more compositions including one or more different mRNAs may be administered in combination. Compositions can be administered concurrently with, prior to, or subsequent to, one or more other desired therapeutics or medical procedures. In general, each agent will be administered at a dose and/or on a time schedule determined for that agent. In some embodiments, the present disclosure encompasses the delivery of compositions of the invention, or imaging, diagnostic, or prophylactic compositions thereof in combination with agents that improve their bioavailability, reduce and/or modify their metabolism, inhibit their excretion, and/or modify their distribution within the body.

[1384] Exemplary therapeutic agents that may be administered in combination with the compositions of the invention include, but are not limited to, cytotoxic, chemotherapeutic, and other therapeutic agents. Cytotoxic agents may include, for example, taxol, cytochalasin B, gramicidin D, ethidium bromide, emetine, mitomycin, etoposide, teniposide, vincristine, vinblastine, colchicine, doxorubicin, daunorubicin, dihydroxyanthracinedione, mitoxantrone, mithramycin, actinomycin D, 1-dehydrotestosterone, glucocorticoids, procaine, tetracaine, lidocaine, propranolol, puromycin, maytansinoids, rachelmycin, and analogs thereof. Radioactive ions may also be used as therapeutic agents and may include, for example, radioactive iodine, strontium, phosphorous, palladium, cesium, iridium, cobalt, yttrium, samarium, and praseodymium. Other therapeutic agents may include, for example, antimetabolites (e.g., methotrexate, 6-mercaptopurine, 6-thioguanine, cytarabine, and 5-fluorouracil, and decarbazine), alkylating agents (e.g., mechlorethamine, thiotepa, chlorambucil, rachelmycin, melphalan, carmustine, lomustine, cyclophosphamide, busulfan, dibromomannitol, streptozotocin, mitomycin C, and cis-dichlorodiamine platinum (II) (DDP), and cisplatin), anthracyclines (e.g., daunorubicin and doxorubicin), antibiotics (e.g., dactinomycin, bleomycin, mithramycin, and anthramycin), and anti-mitotic agents (e.g., vincristine, vinblastine, taxol, and maytansinoids).

[1385] The particular combination of therapies (therapeutics or procedures) to employ in a combination regimen will take into account compatibility of the desired therapeutics and/or procedures and the desired therapeutic effect to be achieved. It will also be appreciated that the therapies employed may achieve a desired effect for the same disorder (for example, a composition useful for treating cancer may be administered concurrently with a chemotherapeutic agent), or they may achieve different effects (e.g., control of any adverse effects).

### Other Embodiments of the Disclosure

[1386] E1. A chemically modified messenger RNA (mmRNA) encoding a polypeptide that induces immunogenic cell death, wherein said mmRNA comprises one or more modified nucleobases.
E2. The mmRNA of embodiment 1, wherein the polypeptide induces necroptosis.
E3. The mmRNA of embodiment 2, wherein the polypeptide is mixed lineage kinase domain-like protein (MLKL), or an immunogenic cell death-inducing fragment thereof.
E4. The mmRNA of embodiment 3, wherein the MLKL polypeptide comprises the amino acid sequence shown in SEQ ID NOs: 1 or 2.
E5. The mmRNA of embodiment 2, wherein the polypeptide is receptor-interacting protein kinase 3 (RIPK3), or an immunogenic cell death-inducing fragment thereof.
E6. The mmRNA of embodiment 5, wherein the RIPK3 polypeptide comprises any of the amino acid sequences shown in SEQ ID NOs: 3-19.
E7. The mmRNA of embodiment 2, wherein the polypeptide is receptor-interacting protein kinase 1 (RIPK1), or an immunogenic cell death-inducing fragment thereof.
E8. The mmRNA of embodiment 7, wherein the RIPK1 polypeptide comprises any of the amino acid sequences shown in SEQ ID NOs: 62-67.
E9. The mmRNA of embodiment 2, wherein the polypeptide is direct IAP binding protein with low pI (DIABLO), or an immunogenic cell death-inducing fragment thereof.
E10. The mmRNA of embodiment 9, wherein the DIABLO polypeptide comprises any of the amino acid sequences shown in SEQ ID NOs: 26-33.
E11. The mmRNA of embodiment 2, wherein the polypeptide is Fas-associated protein with death domain (FADD), or an immunogenic cell death-inducing fragment thereof.
E12. The mmRNA of embodiment 11, wherein the FADD polypeptide comprises any of the amino acid sequences shown in SEQ ID NOs: 56-61.
E13. The mmRNA of embodiment 1, wherein the polypeptide induces pyroptosis.
E14. The mmRNA of embodiment 13, wherein the polypeptide is gasdermin D (GSDMD), or an immunogenic cell death-inducing fragment thereof.
E15. The mmRNA of embodiment 14, wherein the GSDMD polypeptide comprises any of the amino acid sequences shown in SEQ ID NOs: 20-25.
E16. The mmRNA of embodiment 13, wherein the polypeptide is caspase-4, an immunogenic cell death-inducing fragment thereof.
E17. The mmRNA of embodiment 16, wherein the caspase-4 polypeptide comprises any of the amino acid sequences shown in SEQ ID NOs: 34-38.
E18. The mmRNA of embodiment 13, wherein the polypeptide is caspase-5, an immunogenic cell death-inducing fragment thereof.
E19. The mmRNA of embodiment 18, wherein the caspase-5 polypeptide comprises any of the amino acid sequences shown in SEQ ID NOs: 39-43.
E20. The mmRNA of embodiment 13, wherein the polypeptide is caspase-11, an immunogenic cell death-inducing fragment thereof.
E21. The mmRNA of embodiment 20, wherein the caspase-11 polypeptide comprises any of the amino acid sequences shown in SEQ ID NOs: 44-48.
E22. The mmRNA of embodiment 13, wherein the polypeptide is NLRP3, an immunogenic cell death-inducing fragment thereof.
E23. The mmRNA of embodiment 22, wherein the NLRP3 polypeptide comprises any of the amino acid sequences shown in SEQ ID NOs: 51-52.
E24. The mmRNA of embodiment 13, wherein the polypeptide is a Pyrin domain, an immunogenic cell death-inducing fragment thereof.
E25. The mmRNA of embodiment 24, wherein the Pyrin domain polypeptide comprises any of the amino acid sequences shown in SEQ ID NOs: 49-50.
E26. The mmRNA of embodiment 13, wherein the polypeptide is ASC/PYCARD, an immunogenic cell death-inducing fragment thereof.
E27. The mmRNA of embodiment 26, wherein the ASC/PYCARD polypeptide comprises any of the amino acid sequences shown in SEQ ID NOs: 53-54.
E28. The mmRNA of any one of the preceding embodiments wherein the mmRNA comprises a 5′ UTR, a codon optimized open reading frame encoding the polypeptide, a 3′ UTR and a 3′ tailing region of linked nucleosides.
E29. The mmRNA of embodiment 28, wherein the mmRNA further comprises one or more microRNA (miRNA) binding sites.
E30. The mmRNA of any one of the preceding embodiments wherein the mmRNA is fully modified.
E31. The mmRNA of any one of the preceding embodiments wherein the mmRNA comprises pseudouridine (ψ), pseudouridine (ψ) and 5-methyl-cytidine (m⁵C), 1-methyl-pseudouridine (m¹ψ), 1-methyl-pseudouridine (m¹ψ) and 5-methyl-cytidine (m⁵C), 2-thiouridine (s²U), 2-thiouridine and 5-methyl-cytidine (m⁵C), 5-methoxy-uridine (mo⁵U), 5-methoxy-uridine (mo⁵U) and 5-methyl-cytidine (m⁵C), 2′-O-methyl uridine, 2′-O-methyl uridine and 5-methyl-cytidine (m⁵C), N6-methyl-adenosine (m⁶A) or N6-methyl-adenosine (m⁶A) and 5-methyl-cytidine (m⁵C).
E32. The mmRNA of any one of the preceding embodiments wherein the mmRNA comprises pseudouridine (ψ), N1-methylpseudouridine (m¹ψ), 2-thiouridine, 4′-thiouridine, 5-methylcytosine, 2-thio-1-methyl-1-deaza-pseudouridine, 2-thio-1-methyl-pseudouridine, 2-thio-5-aza-uridine, 2-thio-dihydropseudouridine, 2-thio-dihydrouridine, 2-thio-pseudouridine, 4-methoxy-2-thio-pseudouridine, 4-methoxy-pseudouridine, 4-thio-1-methyl-pseudouridine, 4-thio-pseudouridine, 5-aza-uridine, dihydropseudouridine, 5-methoxyuridine, or 2′-O-methyl uridine, or combinations thereof.
E33. The mmRNA of any one of the preceding embodiments wherein the mmRNA comprises 1-methyl-pseudouridine (m¹ψ), 5-methoxy-uridine (mo⁵U), 5-methyl-cytidine (m⁵C), pseudouridine (ψ), α-thio-guanosine, or α-thio-adenosine, or combinations thereof.
E34. A lipid nanoparticle comprising the mmRNA of any one of embodiments 1-33.
E35. The lipid nanoparticle of embodiment 34, which is a liposome.
E36. The lipid nanoparticle of embodiment 34, which comprises a cationic and/or ionizable lipid.
E37. The lipid nanoparticle of embodiment 36, wherein the cationic and/or ionizable lipid is 2,2-dilinoleyl-4-methylaminoethyl-[1,3]-dioxolane (DLin-KC2-DMA) or dilinoleyl-methyl-4-dimethylaminobutyrate (DLin-MC3-DMA).
E38. The lipid nanoparticle of any one of embodiments 34-37, wherein the lipid nanoparticle further comprises a targeting moiety conjugated to the outer surface of the lipid nanoparticle.
E39. A pharmaceutical composition comprising the mmRNA of any of embodiments 1-33 or the lipid nanoparticle of any one of embodiments 34-38, and a pharmaceutically acceptable carrier, diluent or excipient.
E40. A method for inducing immunogenic cell death of a cell, the method comprising contacting the cell with the mmRNA of any one of embodiments 1-33, the lipid nanoparticle of any one of embodiments 34-38 or the pharmaceutical composition of embodiment 39 such that immunogenic cell death of the cell occurs.
E41. The method of embodiment 40, wherein immunogenic cell death is characterized by plasma membrane rupture and release of cytosolic contents of the cell.
E42. The method of embodiment 41, wherein ATP and HMGB1 are released from the cell.
E43. The method of any one of embodiments 40-42, wherein the contacting occurs in vitro or in vivo.
E44. The method of any one of embodiments 40-43, wherein the cell is a cancer cell.
E45. The method of embodiment 44, wherein the cancer cell is a liver cancer cell, a colorectal cancer cell or a melanoma cancer cell.
E46. The method of any one of embodiments 40-45, wherein the cell is a human cell.
E47. A method of stimulating an immunogenic response to a tumor in a subject in need thereof, the method comprising administering to the subject an effective amount of the mmRNA of any one of embodiments 1-33, the lipid nanoparticle of any one of embodiments 34-38, or the pharmaceutical composition of embodiment 39, such that an immunogenic response to the tumor is stimulated in the subject.
E48. The method of embodiment 47, which further comprises administering to the subject at least one agent that potentiates an immune response, wherein the at least one agent that potentiates an immune response induces adaptive immunity, stimulates Type 1 interferon, stimulates an inflammatory response, stimulates NF□B signaling or stimulates dendritic cell mobilization.
E49. The method of embodiment 48, wherein the at least one agent induces adaptive immunity by stimulating Type 1 interferon.
E50. The method of embodiment 47, which further comprises administering to the subject at least one agent that induces T cell activation or priming.
E51. The method of embodiment 50, wherein the at least one agent that induces T cell activation or priming is a cytokine or chemokine.
E52. The method of embodiment 47, which further comprises administering to the subject at least one agent that modulates an immune checkpoint.
E53. The method of embodiment 47, which further comprises administering to the subject: (i) at least one agent that potentiates an immune response; (ii) at least one agent that induces T cell activation or priming; and (iii) at least one agent that modulates an immune checkpoint.
E54. The method of any one of embodiments 47-53, wherein the mmRNA, lipid nanoparticle or pharmaceutical composition is administered to the subject parenterally.
E55. The method of embodiment 54, wherein the mmRNA, lipid nanoparticle or pharmaceutical composition is administered by once weekly infusion.
E56. The method of any one of embodiments 47-55, wherein the subject is a human.
E57. The method of any one of embodiments 47-56, wherein the tumor is a liver cancer or a colorectal cancer.
E58. A method for stimulating an immunogenic response to a tumor in a subject in need thereof, the method comprising administering to the subject an effective amount of:

[1387] (i) a first chemically modified messenger RNA (mmRNA) encoding a polypeptide that induces immunogenic cell death, wherein said first mmRNA comprises one or more modified nucleobases;

[1388] and at least one of:

[1389] (ii) a second mmRNA encoding a polypeptide that potentiates an immune response, wherein said second mmRNA comprises one or more modified nucleobases;

[1390] (iii) a third mmRNA encoding a polypeptide that induces induces T cell activation or priming, wherein said third mmRNA comprises one or more modified nucleobases; and/or

[1391] (iv) a fourth mmRNA encoding a polypeptide that modulates an immune checkpoint, wherein said fourth mmRNA comprises one or more modified nucleobases,

such that an immunogenic response to the tumor is generated in the subject.
E59. The method of embodiment 58, wherein the second mmRNA encodes a polypeptide that induces adaptive immunity, stimulates Type 1 interferon, stimulates an inflammatory response, stimulates NF□B signaling or stimulates dendritic cell mobilization.
E60. The method of embodiment 58, wherein the first mmRNA and second mmRNA are administered to the subject.
E61. The method of embodiment 58, wherein the first mmRNA, the second mmRNA and the third mmRNA are administered to the subject.
E62. The method of embodiment 58, wherein the first mmRNA, the second mmRNA, the third mmRNA and the fourth mmRNA are administered to the subject.
E63. The method of any one of embodiments 58-62, wherein the first mmRNA, second mmRNA, third mmRNA and/or fourth mmRNA are present in the same pharmaceutical compositions or lipid nanoparticle which is administered to the subject.
E64. The method of any one of embodiments 58-63, wherein the polypeptide encoded by the first mmRNA is selected from the group consisting of MLKL, RIPK3, RIPK1, DIABLO, FADD, GSDMD, caspase-4, caspase-5, caspase-1, NLRP3, ASC/PYCARD and Pyrin.
E65. The method of any one of embodiments 58-64, wherein the polypeptide encoded by the second mmRNA is selected from the group consisting of DIABLO, STING, IRF1, IRF3, IRF5, IRF6, IRF7, IRF8, STAT1, STAT2, STAT4, STAT6, NFAT, C/EBPb, IKKβ, c-FLIP, RIPK1, IL-27, ApoF, PLP and FLT3.
E66. The method of any one of embodiments 58 and 60-64, wherein the polypeptide encoded by the third mmRNA is selected from the group consisting of IL-12, IL36g, CCL2, CCL4, CCL20 and CCL21.
E67. The method of any one of embodiments 58 and 61-65, wherein the polypeptide encoded by the fourth mmRNA is selected from the group consisting of PD-1 inhibitors, PD-L1 inhibitors, CTLA-4 inhibitors, OX-40 agonists, OX-40L and ICOS pathway agonists.
E68. A method for stimulating an immunogenic response to a tumor in a subject in need thereof, the method comprising administering to the subject an effective amount of:

[1392] (i) at least one first chemically modified messenger RNA (mmRNA) encoding a polypeptide that induces immunogenic cell death, wherein said first mmRNA comprises one or more modified nucleobases;

[1393] and at least one of:

[1394] (ii) at least one second mmRNA encoding a polypeptide that potentiates an immune response, wherein said second mmRNA comprises one or more modified nucleobases; and/or

[1395] (iii) an immune checkpoint inhibitor,

such that an immunogenic response to the tumor is generated in the subject.
E69. The method of embodiment 68, wherein the at least one first mmRNA encodes a polypeptide selected from the group consisting of MLKL, Diablo, RIPK3, and combinations thereof.
E70. The method of embodiment 69, wherein the first mmRNA encodes MLKL.
E71. The method of embodiment 69, wherein the first mmRNA encodes Diablo.
E72. The method of embodiment 69, wherein the first mmRNA encodes RIPK3.
E73. The method of embodiment 69, wherein the first mmRNA comprises two mmRNAs, one encoding MLKL and one encoding Diablo.
E74. The method of embodiment 69, wherein the first mmRNA comprises two mmRNAs, one encoding MLKL and one encoding RIPK3
E75. The method of embodiment 69, wherein the first mmRNA comprises two mmRNAs, one encoding RIPK3 and one encoding Diablo.
E76. The method of any one of embodiments 68-75, wherein the second mmRNA encodes STING.
E77. The method of any one of embodiments 68-76, wherein the immune checkpoint inhibitor is an anti-CTLA-4 antibody.
E78. The method of any one of embodiments 68-76, wherein the immune checkpoint inhibitor is an anti-PD-1 antibody.
E79. A chemically modified messenger RNA (mmRNA) encoding a polypeptide that enhances an immune response to an antigen of interest in a subject, wherein said mmRNA comprises one or more modified nucleobases, and wherein the immune response comprises a cellular or humoral immune response characterized by:

[1396] (i) stimulating Type I interferon pathway signaling;

[1397] (ii) stimulating NFkB pathway signaling;

[1398] (iii) stimulating an inflammatory response;

[1399] (iv) stimulating cytokine production; or

[1400] (v) stimulating dendritic cell development, activity or mobilization; and

[1401] (vi) a combination of any of (i)-(vi).

E80. The mmRNA of embodiment 79, wherein the antigen of interest is an endogenous antigen in the subject.
E81. The mmRNA of embodiment 79, wherein the antigen of interest is an exogenous antigen coadministered to the subject with the mmRNA.
E82. The mmRNA of embodiment 81 wherein the antigen of interest is encoded by an mmRNA.
E83. The mmRNA of any of embodiments 79-82, which encodes a constitutively active human STING polypeptide.
E84. The mmRNA of embodiment 83, wherein the constitutively active human STING polypeptide comprises one or more mutations selected from the group consisting of V147L, N154S, V155M, R284M, R284K, R284T, E315Q, R375A, and combinations thereof.
E85. The mmRNA of embodiment 84, wherein the constitutively active human STING polypeptide comprises a V155M mutation.
E86. The mmRNA of embodiment 84, wherein the constitutively active human STING polypeptide comprises mutations R284M/V147L/N154S/V155M.
E87. The mmRNA of embodiment 84, wherein the constitutively active human STING polypeptide comprises an amino acid sequence shown in any one of SEQ ID NOs: 1-10 or is encoded by a nucleotide sequence shown in any one of SEQ ID NOs: 199-208, 225, 1319 or 1320.
E88. The mmRNA of any one of embodiments 79-82, wherein the mmRNA encodes a constitutively active IRF3 polypeptide.
E89. The mmRNA of embodiment 88, wherein the constitutively active IRF3 polypeptide comprises an S396D mutation.
E90. The mmRNA of embodiment 89, wherein the constitutively active IRF3 polypeptide comprises an amino acid sequence shown in any one of SEQ ID NOs: 11-12.
E91. The mmRNA of any one of embodiments 79-82, wherein the mmRNA encodes a constitutively active human IRF7 polypeptide.
E92. The mmRNA of embodiment 91, wherein the constitutively active human IRF7 polypeptide comprises one or more mutations selected from the group consisting of S475D, S476D, S477D, S479D, L480D, S483D, S487D, deletion of amino acids 247-467, and combinations thereof.
E93. The mmRNA of embodiment 91, wherein the constitutively active human IRF7 polypeptide comprises an amino acid sequence shown in any one of SEQ ID NOs: 14-18.
E94. The mmRNA of any one of embodiments 79-82, wherein the polypeptide is selected from the group consisting of MyD88, TRAM, IRF1, IRF8, IRF9, TBK1, IKKi, STAT1, STAT2, STAT4, STAT6, c-FLIP, IKKβ, RIPK1, TAK-TAB1, DIABLO, Btk, self-activating caspase-1 and Flt3.
E95. The mmRNA of any one of embodiments 79-82, wherein the polypeptide stimulates Type I interferon pathway signaling.
E96. The mmRNA of any one of embodiments 79-82, wherein the polypeptide stimulates NFkB signaling.
E97. The mmRNA of any one of embodiments 79-82, wherein the polypeptide stimulates cytokine production.
E98. The mmRNA of any one of embodiments 79-82 wherein the immune response enhanced by the polypeptide is a cellular immune response.
E99. The mmRNA of any one of embodiments 79-82, wherein the immune response enhanced by the polypeptide is a humoral immune response.
E100. A composition comprising the mmRNA of any one of embodiments 79, 81-99 and a second mmRNA encoding at least one antigen of interest, wherein said second mmRNA comprises one or more modified nucleobases and wherein the polypeptide enhances an immune response to the at least one antigen of interest when the composition is administered to a subject.
E101. The composition of embodiment 100, which comprises a single mmRNA construct encoding both the at least one antigen of interest and the polypeptide that enhances an immune response to the at least one antigen of interest.
E102. The composition of embodiment 100, which comprises two mmRNA constructs, one encoding the at least one antigen of interest and the other encoding the polypeptide that enhances an immune response to the at least one antigen of interest.
E103. The composition of embodiment 102, wherein the two mmRNA constructs are coformulated in a lipid nanoparticle.
E104. The composition of any one of embodiments 100-103, wherein the at least one antigen of interest is at least one tumor antigen.
E105. The composition of embodiment 104, wherein the at least one tumor antigen is at least one mutant KRAS antigen.
E106. The composition of embodiment 105, wherein the at least one mutant KRAS antigen comprises at least one mutation selected from group consisting of G12D, G12V, G13D, G12C and combinations thereof.
E107. The composition of embodiment 105, wherein the at least one mutant KRAS antigen comprises an amino acid sequence shown in any one of SEQ ID NOs: 95-106 and 131-132 or is encoded by a nucleotide sequence shown in SEQ ID NO: 1321 or 1322.
E108. The composition of embodiment 105, which comprises an mmRNA encoding at least one mutant KRAS antigen and a constitutively active STING polypeptide, wherein the mmRNA encodes an amino acid sequence shown in any one of SEQ ID NOs: 107-130.
E109. The composition of any one of embodiment 100-103, wherein the at least one antigen of interest is at least one pathogen antigen.
E110. The composition of embodiment 109, wherein the at least one pathogen antigen is from a pathogen selected from the group consisting of viruses, bacteria, protozoa, fungi and parasites.
E111. The composition of embodiment 110, wherein the at least one pathogen antigen is at least one viral antigen.
E112. The composition of embodiment 111, wherein the at least one viral antigen is at least one human papillomavirus (HPV) antigen.
E113. The composition of embodiment 112, wherein the HPV antigen is an HPV16 E6 or HPV E7 antigen, or combination thereof.
E114. The composition of embodiment 113, wherein the HPV antigen comprises an amino acid sequence shown in any one of SEQ ID NOs: 36-94.
E115. The composition of embodiment 110, wherein the at least one pathogen antigen is at least one bacterial antigen.
E116. The mmRNA or composition of any one of embodiments 79-115 wherein the mmRNA(s) comprises a 5′ UTR, a codon optimized open reading frame encoding the polypeptide, a 3′ UTR and a 3′ tailing region of linked nucleosides.
E117. The mmRNA or composition of embodiment 116, wherein the mmRNA(s) further comprises one or more microRNA (miRNA) binding sites.
E118. The mmRNA or composition of any one of embodiments 79-117 wherein the mmRNA(s) is fully modified.
E119. The mmRNA or composition of any one of embodiments 79-118 wherein the mmRNA(s) comprises pseudouridine (ψ), pseudouridine (ψ) and 5-methyl-cytidine (m⁵C), 1-methyl-pseudouridine (m¹ψ), 1-methyl-pseudouridine (m¹ψ) and 5-methyl-cytidine (m⁵C), 2-thiouridine (s²U), 2-thiouridine and 5-methyl-cytidine (m⁵C), 5-methoxy-uridine (mo⁵U), 5-methoxy-uridine (mo⁵U) and 5-methyl-cytidine (m⁵C), 2′-O-methyl uridine, 2′-O-methyl uridine and 5-methyl-cytidine (m⁵C), N6-methyl-adenosine (m⁶A) or N6-methyl-adenosine (m⁶A) and 5-methyl-cytidine (m⁵C).
E120. The mmRNA or composition of any one of embodiments 79-119 wherein the mmRNA(s) comprises pseudouridine (ψ), N1-methylpseudouridine (m¹ψ), 2-thiouridine, 4′-thiouridine, 5-methylcytosine, 2-thio-1-methyl-1-deaza-pseudouridine, 2-thio-1-methyl-pseudouridine, 2-thio-5-aza-uridine, 2-thio-dihydropseudouridine, 2-thio-dihydrouridine, 2-thio-pseudouridine, 4-methoxy-2-thio-pseudouridine, 4-methoxy-pseudouridine, 4-thio-1-methyl-pseudouridine, 4-thio-pseudouridine, 5-aza-uridine, dihydropseudouridine, 5-methoxyuridine, or 2′-O-methyl uridine, or combinations thereof.
E121. The mmRNA or composition of any one of embodiments 79-120 wherein the mmRNA(s) comprises 1-methyl-pseudouridine (m¹ψ), 5-methoxy-uridine (mo⁵U), 5-methyl-cytidine (m⁵C), pseudouridine (ψ), α-thio-guanosine, or α-thio-adenosine, or combinations thereof.
E122. A lipid nanoparticle comprising the mmRNA or composition of any of embodiments 79-121.
E123. The lipid nanoparticle of embodiment 122, which is a liposome.
E124. The lipid nanoparticle of embodiment 122, which comprises a cationic and/or ionizable amino lipid.
E125. The lipid nanoparticle of embodiment 124, wherein the cationic and/or ionizable amino lipid is 2,2-dilinoleyl-4-methylaminoethyl-[1,3]-dioxolane (DLin-KC2-DMA) or dilinoleyl-methyl-4-dimethylaminobutyrate (DLin-MC3-DMA).
E126. The lipid nanoparticle of any one of embodiments 122-125, wherein the lipid nanoparticle further comprises a targeting moiety conjugated to the outer surface of the lipid nanoparticle.
E127. A pharmaceutical composition comprising the mmRNA or composition of any of embodiments 79-121 or the lipid nanoparticle of any one of embodiments 122-126, and a pharmaceutically acceptable carrier, diluent or excipient.
E128. A method for enhancing an immune response to an antigen of interest, the method comprising administering to a subject the mmRNA or composition of any one of embodiments 79-121, the lipid nanoparticle of any one of embodiments 122-126 or the pharmaceutical composition of embodiment 127 such that an immune response to the antigen of interest is enhanced in the subject.
E129. The method of embodiment 128, wherein enhancing an immune response comprises stimulating cytokine production.
E130. The method of embodiment 128, wherein enhancing an immune response comprises stimulating antigen-specific CD8⁺ T cell activity.
E131. The method of embodiment 128, wherein enhancing an immune response comprises stimulating antigen-specific antibody production.
E132. The method of embodiment 128, which comprises administering to the subject an mRNA composition that stimulates dendritic cell development or activity prior to administering to the subject an mRNA composition that stimulates Type I interferon pathway signaling.
E133. A method of stimulating an immunogenic response to a tumor in a subject in need thereof, the method comprising administering to the subject an effective amount of the mmRNA or the composition of any one of embodiments 79-121, or a lipid nanoparticle thereof, or a pharmaceutical composition thereof, such that an immunogenic response to the tumor is stimulated in the subject.
E134. The method of embodiment 133, wherein the tumor is a liver cancer, a colorectal cancer, a melanoma cancer, a pancreatic cancer, a non-small cell lung cancer (NSCLC), a cervical cancer or a head or neck cancer.
E135. The method of embodiment 133, wherein the subject is a human.
E136. A method of stimulating an immunogenic response to a pathogen in a subject in need thereof, the method comprising administering to the subject an effective amount of the mmRNA of any one of embodiments 79-99 and 116-121, or the composition of any one of embodiments 100-115, or a lipid nanoparticle thereof, or a pharmaceutical composition thereof, such that an immunogenic response to the pathogen is stimulated in the subject.
JE137. The method of embodiment 136, wherein the pathogen is selected from the group consisting of viruses, bacteria, protozoa, fungi and parasites.
E138. The method of embodiment 137, wherein the pathogen is a virus.
E139. The method of embodiment 138, wherein the pathogen is human papillomavirus (HPV).
E140. The method of embodiment 137, wherein the pathogen is a bacteria.
E141. The method of embodiment 136, wherein the subject is a human.
E142. A method of preventing or treating an Human Papilloma Virus (HPV)-associated cancer in a subject in need thereof, the method comprising administering to the subject a composition comprising at least one mRNA construct encoding: (i) at least one HPV antigen of interest and (ii) a polypeptide that enhances an immune response against the at least one HPV antigen of interest, such that an immune response to the at least one HPV antigen of interest is enhanced.
E143. The method of embodiment 142, wherein the polypeptide that enhances an immune response against the at least one HPV antigen(s) of interest is a STING polypeptide.
E144. The method of embodiment 142, wherein the at least one HPV antigen is at least one E6 antigen, at least one E7 antigen or a combination of at least one E6 antigen and at least one E7 antigen.
E145. The method of embodiment 142, wherein the at least one HPV antigen and the polypeptide are encoded on separate mRNAs and are coformulated in a lipid nanoparticular prior to administration to the subject.
E146. The method embodiment 142, wherein the subject is at risk for exposure to HPV and the composition is administered prior to exposure to HPV.
E147. The method of embodiment 142, wherein the subject is infected with HPV or has an HPV-associated cancer.
E148. The method of embodiment 147, wherein the cancer is selected from the group consisting of cervical, penile, vaginal, vulval, anal and oropharyngeal cancers.
E149. The method of embodiment 148, wherein the subject is also treated with an immune checkpoint inhibitor.
E150. A composition comprising a first chemically modified messenger RNA (mmRNA) encoding a polypeptide that enhances an immune response to at least one oncogenic viral antigen of interest in a subject, and a second mmRNA encoding the at least one oncogenic viral antigen of interest, wherein each mmRNA comprises one or more modified nucleobases, and wherein the immune response comprises a cellular or humoral immune response characterized by:

[1402] (i) stimulating Type I interferon pathway signaling;

[1403] (ii) stimulating NFkB pathway signaling;

[1404] (iii) stimulating an inflammatory response;

[1405] (iv) stimulating cytokine production; or

[1406] (v) stimulating dendritic cell development, activity or mobilization; and

[1407] (vi) a combination of any of (i)-(vi).

E151. The composition of embodiment 150, which comprises a single mmRNA construct encoding both the at least one oncogenic viral antigen of interest and the polypeptide that enhances an immune response to the at least one oncogenic viral antigen of interest.
E152. The composition of embodiment 150 or 151, wherein the at least one oncogenic viral antigen of interest is derived from an oncogenic virus selected from the group consisting of: Human Papillomavirus (HPV), Hepatitis B virus (HBV), Hepatitis C virus (HCV), Epstein-barr virus (EBV), Human T-cell Lymphotropic virus type 1 (HTLV-1), Kaposi's sarcoma herpesvirus (KSHV) and Merkel cell polyomavirus (MCPyV).
E153. The composition of embodiment 150 or 151, wherein the at least one oncogenic viral antigen of interest is selected from the group of HPV antigens consisting of: E1, E2, E4, E5, E6, E7, L1, L2 and combinations thereof.
E154. The composition of embodiment 150 or 151, wherein the at least one oncogenic viral antigen of interest is selected from the group of HBV antigens consisting of: HBsAg, HBcAg, HBeAg, HBxAg, Pol, and combinations thereof.
E155. The composition of embodiment 150 or 151, wherein the at least one oncogenic viral antigen of interest is selected from the group of HCV antigens consisting of: Core (C, p22), E1 (gp35), E2 (gp70), NS1 (p7), NS2 (p23), NS3 (p70), NS4A (p8), NS4B (p27), NS5A (p56/58), NS5B (p68), and combinations thereof.
E156. The composition of embodiment 150 or 151, wherein the at least one oncogenic viral antigen of interest is an antigenic polypeptide from EBV-1 or EBV-2.
E157. The composition of embodiment 150 or 151, wherein the at least one oncogenic viral antigen of interest is selected from the group of HTLV-1 antigens consisting of: gag, pol, pro, env, tax, rex, p12, p21, p13, p30, HBZ, and combinations thereof.
E158. The composition of embodiment 150 or 151, wherein the at least one oncogenic viral antigen is an antigenic polypeptide from KSHV subtype A, KSHV subtype B, KSHV subtype C, KSHV subtype D, KSHV subtype E, or combinations thereof.
E159. The composition of embodiment 150 or 151, wherein the at least one oncogenic viral antigen of interest is selected from the group of MCPyV antigens consisting of: large T antigen (LT), small T antigen (sT), 57 kT antigen (57 kT), alternative T antigen (ALTO), major capsid protein viral protein 1 (VP1), the minor capsid viral proteins 2 or 3 (VP2 or VP3), and combinations thereof.
E160. The composition of any one of embodiments 150-159, wherein the at least one oncogenic viral antigen is a concatemeric oncogenic viral antigen comprised of 2-20 oncogenic viral antigens.
E161. The composition of embodiment 160, wherein the concatemeric oncogenic viral antigen comprises one or more of:

[1408] a) the 22-20 oncogenic viral antigens are interspersed by cleavage sensitive sites;

[1409] b) the mmRNA encoding each oncogenic viral antigen is linked directly to one another without a linker; and/or

[1410] c) the mmRNA encoding each oncogenic viral is linked to one or another with a single nucleotide linker.

E162. The composition of any one of embodiments 150-161, further comprising a ubiquitination signal.
E163. The composition of embodiment 162, wherein the ubiquitination signal is located at the C-terminus of the mmRNA.
E164. The composition of any one of embodiments 161-163, wherein at least one of the cleavage sites is an APC cleavage site.
E165. The composition of embodiment 164, wherein the cleavage site is a cleavage site for a serine protease, a threonine protease, a cysteine protease, an aspartate protease, a glutamic acid protease, or a metalloprotease.
E166. The composition of embodiment 165, wherein the cleavage site is for a cysteine protease.
E167. The composition of embodiment 166, wherein the cysteine protease is cathepsin B.
E168. The composition of embodiment 164, wherein the cleavage site comprises the amino acid sequence GFLG, Arg-↓-NHMec; Bz-Arg-↓-NhNap; Bz-Arg-↓NHMec; Bz-Phe-Cal-Arg-↓-NHMec; Pro-Gly-↓-Phe; Xaa-Xaa-Val-Val-Arg-Xaa-X or Arg-Arg, wherein Xaa is any amino acid residue.
E169. The composition of any one of embodiment 150-168, further comprising a recall antigen.
E170. The composition of embodiment 169, wherein the recall antigen is an mRNA having an open reading frame encoding the recall antigen.
E171. The composition of embodiment 169 or 170, wherein the recall antigen is included in the concatemeric antigen.
E172. The composition of any one of embodiment 150-171, further comprising an endosomal targeting sequence.
E173. The composition of embodiment 172, wherein the endosomal targeting sequence comprises at least a portion of the transmembrane domain of lysosome associated membrane protein (LAMP-1).
E174. The composition of embodiment 172, wherein the endosomal targeting sequence comprises at least a portion of the transmembrane domain of invariant chain (Ii).
E175. A composition comprising a first chemically modified messenger RNA (mmRNA) encoding a polypeptide that enhances an immune response to at least one antigen derived from HPV, and a second mmRNA encoding the at least one antigen derived from HPV, wherein each mmRNA comprises one or more modified nucleobases.
E176. The composition of embodiment 175, wherein the second mmRNA encodes HPV antigen E6 and/or HPV antigen E7.
E177. The composition of embodiment 175 or 176, wherein the first mmRNA encodes a constitutively active human STING polypeptide.
E178. The composition of any one of embodiment 150-177, wherein each mmRNA is formulated in the same or different lipid nanoparticle.
E179. The composition of embodiment 178, wherein each mmRNA encoding an oncogenic viral antigen is formulated in the same or different lipid nanoparticle.
E180. The composition of embodiment 179, wherein each mmRNA encoding a polypeptide that enhances an immune response to the oncogenic viral antigen is formulated in the same or different lipid nanoparticle.
E181. The composition of any one of embodiments 178-180, wherein each mmRNA encoding an oncogenic viral antigen is formulated in the same lipid nanoparticle, and each mmRNA encoding a polypeptide that enhances an immune response to the oncogenic viral antigen is formulated in a different lipid nanoparticle.
E182. The composition of any one of embodiments 178-180, wherein each mmRNA encoding an oncogenic viral antigen is formulated in the same lipid nanoparticle, and each mmRNA encoding a polypeptide that enhances an immune response to the oncogenic viral antigen is formulated in the same lipid nanoparticle as each mmRNA encoding an oncogenic viral antigen.
E183. The composition of any one of embodiments 178-180, wherein each mmRNA encoding an oncogenic viral antigen is formulated in a different lipid nanoparticle, and each mmRNA encoding a polypeptide that enhances an immune response to the oncogenic viral antigen is formulated in the same lipid nanoparticle as each mmRNA encoding each oncogenic viral antigen.
E184. A lipid nanoparticle carrier comprising a pharmaceutical composition, wherein the pharmaceutical composition comprises:

[1411] an mmRNA having an open reading frame encoding a concatemer of oncogenic viral antigens;

[1412] an mmRNA having an open reading frame encoding a polypeptide that enhances an immune response to the concatemer of oncogenic viral antigens; and

[1413] a pharmaceutically acceptable carrier or excipient.

E185. A lipid nanoparticle carrier comprising a pharmaceutical composition, wherein the pharmaceutical composition comprises:

[1414] at least one mmRNA having an open reading frame encoding an oncogenic viral antigen;

[1415] an mmRNA having an open reading frame encoding a polypeptide that enhances an immune response to the oncogenic viral antigen; and

[1416] a pharmaceutically acceptable carrier or excipient.

E186. A lipid nanoparticle carrier comprising a pharmaceutical composition, wherein the pharmaceutical composition comprises:

[1417] an mmRNA having an open reading frame encoding a concatemer of HPV antigens;

[1418] an mmRNA having an open reading frame encoding a constitutively active human STING polypeptide; and

[1419] a pharmaceutically acceptable carrier or excipient.

E187. The lipid nanoparticle carrier of embodiment 186, wherein the concatemer of HPV antigens comprises HPV antigens E6 and E7.
E188. A lipid nanoparticle carrier comprising a pharmaceutical composition, wherein the pharmaceutical composition comprises:

[1420] an mmRNA having an open reading frame encoding HPV viral antigen E6;

[1421] an mmRNA having an open reading frame encoding HPV viral antigen E7;

[1422] an mmRNA having an open reading frame encoding a constitutively active human STING polypeptide; and

[1423] a pharmaceutically acceptable carrier or excipient

E189. A vaccine comprising:

[1424] a first nanoparticle comprising a pharmaceutical composition, wherein the pharmaceutical composition comprises an mmRNA having an open reading frame encoding a first oncogenic viral antigen of interest, an mmRNA having an open reading frame encoding a polypeptide that enhances an immune response to the first oncogenic viral antigen of interest, and a pharmaceutically acceptable carrier or excipient;

[1425] a second nanoparticle comprising a pharmaceutical composition, wherein the pharmaceutical composition comprises an mmRNA having an open reading frame encoding a second oncogenic viral antigen of interest, an mmRNA having an open reading frame encoding a polypeptide that enhances an immune response to the second oncogenic viral antigen of interest, and a pharmaceutically acceptable carrier or excipient;

[1426] a third nanoparticle comprising a pharmaceutical composition, wherein the pharmaceutical composition comprises an mmRNA having an open reading frame encoding a third oncogenic viral antigen of interest, an mmRNA having an open reading frame encoding a polypeptide that enhances an immune response to the third oncogenic viral antigen of interest, and a pharmaceutically acceptable carrier or excipient;

[1427] a fourth nanoparticle comprising a pharmaceutical composition, wherein the pharmaceutical composition comprises an mmRNA having an open reading frame encoding a fourth oncogenic viral antigen of interest, an mmRNA having an open reading frame encoding a polypeptide that enhances an immune response to the fourth oncogenic viral antigen of interest, and a pharmaceutically acceptable carrier or excipient; or

[1428] a combination thereof.

E190. A vaccine comprising:

[1429] a nanoparticle comprising a pharmaceutical composition, wherein the pharmaceutical composition comprises an mmRNA having an open reading frame encoding a concatemeric oncogenic viral antigen of interest, an mmRNA having an open reading frame encoding a polypeptide that enhances an immune response to the concatemeric oncogenic viral antigen of interest, and a pharmaceutically acceptable carrier or excipient.

E191. A vaccine comprising:

[1430] a first nanoparticle comprising a pharmaceutical composition, wherein the pharmaceutical composition comprises an mmRNA having an open reading frame encoding HPV antigen E6, an mmRNA having an open reading frame encoding a constitutively active human STING polypeptide, and a pharmaceutically acceptable carrier or excipient; and

[1431] a second nanoparticle comprising a pharmaceutical composition, wherein the pharmaceutical composition comprises an mmRNA having an open reading frame encoding HPV antigen E7, an mmRNA having an open reading frame encoding a constitutively active human STING polypeptide, and a pharmaceutically acceptable carrier or excipient.

E192. A method of preventing tumor growth in a subject infected with an oncogenic virus, comprising administering to the subject the composition, lipid nanoparticle carrier, or vaccine of any one of embodiments 150-191, such that tumor growth is prevented in the subject.
E193. The method of embodiment 192, wherein the subject has no detectable tumor prior to administration.
E194. A method of inhibiting tumor growth in a subject infected with an oncogenic virus, comprising administering to the subject the composition, lipid nanoparticle carrier, or vaccine of any one of embodiment 150-191, such that tumor growth is inhibited in the subject.
E195. The method of embodiment 194, wherein tumor formation prior to administration is a result of infection with the oncogenic virus.
E196. A method of treating cancer in a cancer subject infected with an oncogenic virus, comprising administering to the subject the composition, lipid nanoparticle carrier, or vaccine of any one of embodiments 150-191, such that cancer is treated in the subject.
E197. The method of embodiment 196, wherein the cancer is a result of infection with the oncogenic virus.
E198. A personalized cancer vaccine comprising a first chemically modified messenger RNA (mmRNA) encoding a polypeptide that enhances an immune response to at least one cancer antigen of interest in a subject, and a second mmRNA encoding the at least one cancer antigen of interest, wherein each mmRNA comprises one or more modified nucleobases, and wherein the immune response comprises a cellular or humoral immune response characterized by:

[1432] (i) stimulating Type I interferon pathway signaling;

[1433] (ii) stimulating NFkB pathway signaling;

[1434] (iii) stimulating an inflammatory response;

[1435] (iv) stimulating cytokine production; or

[1436] (v) stimulating dendritic cell development, activity or mobilization; and

[1437] (vi) a combination of any of (i)-(vi).

E199. The personalized cancer vaccine of embodiment 198, which comprises a single mmRNA construct encoding both the at least one cancer antigen of interest and the polypeptide that enhances an immune response to the at least one cancer antigen of interest.
E200. The personalized cancer vaccine of embodiment 198 or 199, wherein the at least one cancer antigen of interest is a concatemeric cancer antigen comprised of 2-100 peptide epitopes.
E201. The personalized cancer vaccine of embodiment 200, wherein the concatemeric cancer antigen comprises one or more of:

[1438] a) the 2-100 peptide epitopes are interspersed by cleavage sensitive sites;

[1439] b) the mRNA encoding each peptide epitope is linked directly to one another without a linker;

[1440] c) the mRNA encoding each peptide epitope is linked to one or another with a single nucleotide linker;

[1441] d) each peptide epitope comprises 25-35 amino acids and includes a centrally located SNP mutation;

[1442] e) at least 30% of the peptide epitopes have a highest affinity for class I MHC molecules from a subject;

[1443] f) at least 30% of the peptide epitopes have a highest affinity for class II MHC molecules from a subject;

[1444] g) at least 50% of the peptide epitopes have a predicated binding affinity of IC >500 nM for HLA-A, HLA-B and/or DRB1;

[1445] h) the mRNA encodes 20 peptide epitopes;

[1446] i) 50% of the peptide epitopes have a binding affinity for class I MHC and 50% of the peptide epitopes have a binding affinity for class II MHC; and/or

[1447] j) the mRNA encoding the peptide epitopes is arranged such that the peptide epitopes are ordered to minimize pseudo-epitopes.

E202. The personalized cancer vaccine of embodiment 201, wherein each peptide epitope comprises 31 amino acids and includes a centrally located SNP mutation with 15 flanking amino acids on each side of the SNP mutation.
E203. The personalized cancer vaccine of any one of embodiments 200-202, wherein the peptide epitopes are T cell epitopes and/or B cell epitopes.
E204. The personalized cancer vaccine of any one of embodiments 200-203, wherein the peptide epitopes comprise a combination of T cell epitopes and B cell epitopes.
E205. The personalized cancer vaccine of any one of embodiments 200-204, wherein at least 1 of the peptide epitopes is a T cell epitope.
E206. The personalized cancer vaccine of any one of embodiments 200-205, wherein at least 1 of the peptide epitopes is a B cell epitope.
E207. The personalized cancer vaccine of any one of embodiments 200-206 wherein the T cell epitope comprises between 8-11 amino acids.
E208. The personalized cancer vaccine of any one of embodiments 200-207, wherein the B cell epitope comprises between 13-17 amino acids.
E209. The personalized cancer vaccine of any one of embodiments 198-208, further comprising a ubiquitination signal.
E210. The personalized cancer vaccine of embodiment 209, wherein the ubiquitination signal is located at the C-terminus of the mmRNA.
E211. The personalized cancer vaccine of any one of embodiments 201-210, wherein at least one of the cleavage sensitive sites is an APC cleavage site.
E212. The personalized cancer vaccine of embodiment 211, wherein the cleavage site is a cleavage site for a serine protease, a threonine protease, a cysteine protease, an aspartate protease, a glutamic acid protease, or a metalloprotease.
E213. The personalized cancer vaccine of embodiment 212, wherein the cleavage site is for a cysteine protease.
E214. The personalized cancer vaccine of embodiment 213, wherein the cysteine protease is cathepsin B.
E215. The personalized cancer vaccine of embodiment 214, wherein the cleavage site comprises the amino acid sequence GFLG, Arg-↓-NHMec; Bz-Arg-↓-NhNap; Bz-Arg-↓NHMec; Bz-Phe-Cal-Arg-↓-NHMec; Pro-Gly-↓-Phe; Xaa-Xaa-Val-Val-Arg-Xaa-X or Arg-Arg, wherein Xaa is any amino acid residue.
E216. The personalized cancer vaccine of any one of embodiments 200-215, wherein each peptide epitope comprises an antigenic region and a MHC stabilizing region.
E217. The personalized cancer vaccine of embodiment 216, wherein the MHC stabilizing region is 5-10 amino acids in length.
E218. The personalized cancer vaccine of embodiment 216 or 217, wherein the antigenic region is 5-100 amino acids in length.
E219. The personalized cancer vaccine of any one of embodiments 200-218, wherein the peptide epitopes have been optimized for binding strength to a MHC of the subject.
E220. The personalized cancer vaccine of embodiment 219, wherein a TCR face for each epitope has a low similarity to endogenous proteins.
E221. The personalized cancer vaccine of any one of embodiments 198-220, further comprising a recall antigen.
E222. The personalized cancer vaccine of embodiment 221, wherein the recall antigen is an infectious disease antigen.
E223. The personalized cancer vaccine of embodiment 221 or 222, wherein the recall antigen is an mRNA having an open reading frame encoding the recall antigen.
E224. The personalized cancer vaccine of any one of embodiments 221-223, wherein the recall antigen is a peptide epitope in the concatemeric antigen.
E225. The personalized cancer vaccine of any one of embodiments 221 and 223-224, wherein the recall antigen is an influenza antigen.
E226. The personalized cancer vaccine of any one of embodiments 198-225, further comprising an endosomal targeting sequence.
E227. The personalized cancer vaccine of embodiment 226, wherein the endosomal targeting sequence comprises at least a portion of the transmembrane domain of lysosome associated membrane protein (LAMP-1).
E228. The personalized cancer vaccine of embodiment 226, wherein the endosomal targeting sequence comprises at least a portion of the transmembrane domain of invariant chain (Ii).
E229. The personalized cancer vaccine of embodiment 200, wherein the peptide epitopes comprise at least one MHC class I epitope and at least one MHC class II epitope.
E230. The personalized cancer vaccine of embodiment 229, wherein at least 30% of the epitopes are MHC class I epitopes.
E231. The personalized cancer vaccine of embodiment 229, wherein at least 30% of the epitopes are MHC class II epitopes.
E232. The personalized cancer vaccine of any one of embodiment 198-231, further comprising an ORF encoding one or more traditional cancer antigens.
E233. The personalized cancer vaccine of any one of embodiments 198-232, further comprising an mRNA having an open reading frame encoding one or more traditional cancer antigens.
E234. The personalized cancer vaccine of any one of embodiments 198-233, wherein the polypeptide that enhances an immune response to at least one cancer antigen of interest in a subject is a constitutively active human STING polypeptide.
E235. The personalized cancer vaccine of embodiment 234, wherein the constitutively active human STING polypeptide comprises one or more mutations selected from the group consisting of V147L, N154S, V155M, R284M, R284K, R284T, E315Q, R375A, and combinations thereof.
E236. The personalized cancer vaccine of embodiment 235, wherein the constitutively active human STING polypeptide comprises a V155M mutation.
E237. The personalized cancer vaccine of embodiment 235, wherein the constitutively active human STING polypeptide comprises mutations R284M/V147L/N154S/V155M.
E238. A composition comprising the personalized cancer vaccine of any one of embodiments 198-238.
E239. The composition of embodiment 238, wherein each mmRNA is formulated in the same or different lipid nanoparticle.
E240. The composition of embodiment 239, wherein each mmRNA encoding a cancer antigen of interest is formulated in the same or different lipid nanoparticle.
E241. The composition of embodiment 240, wherein each mmRNA encoding a polypeptide that enhances an immune response to the cancer antigen of interest is formulated in the same or different lipid nanoparticle.
E242. The composition of any one of embodiments 239-241, wherein each mmRNA encoding a cancer antigen of interest is formulated in the same lipid nanoparticle, and each mmRNA encoding a polypeptide that enhances an immune response to the cancer antigen of interest is formulated in a different lipid nanoparticle.
E243. The composition of any one of embodiments 239-241, wherein each mmRNA encoding a cancer antigen of interest is formulated in the same lipid nanoparticle, and each mmRNA encoding a polypeptide that enhances an immune response to the cancer antigen of interest is formulated in the same lipid nanoparticle as each mmRNA encoding a cancer antigen of interest.
E244. The composition of any one of embodiments 239-241, wherein each mmRNA encoding a cancer antigen of interest is formulated in a different lipid nanoparticle, and each mmRNA encoding a polypeptide that enhances an immune response to the cancer antigen of interest is formulated in the same lipid nanoparticle as each mmRNA encoding each cancer antigen of interest.
E245. A lipid nanoparticle carrier comprising a pharmaceutical composition, wherein the pharmaceutical composition comprises:

[1448] an mmRNA having an open reading frame encoding a concatemeric cancer antigen of interest;

[1449] an mmRNA having an open reading frame encoding a polypeptide that enhances an immune response to the concatemeric cancer antigen of interest;

[1450] and a pharmaceutically acceptable carrier or excipient.

E246. A lipid nanoparticle carrier comprising a pharmaceutical composition, wherein the pharmaceutical composition comprises:

[1451] at least one mmRNA having an open reading frame encoding a cancer antigen of interest;

[1452] an mmRNA having an open reading frame encoding a polypeptide that enhances an immune response to the cancer antigen of interest; and

[1453] a pharmaceutically acceptable carrier or excipient.

E247. A personalized cancer vaccine comprising:

[1454] a lipid nanoparticle comprising a pharmaceutical composition, wherein the pharmaceutical composition comprises at least one mmRNA having an open reading frame encoding a cancer antigen of interest in a subject, an mmRNA having an open reading frame encoding a polypeptide that enhances an immune response to the cancer antigen of interest, and a pharmaceutically acceptable carrier or excipient.

E248. A personalized cancer vaccine comprising:

[1455] a lipid nanoparticle comprising a pharmaceutical composition, wherein the pharmaceutical composition comprises at least one mmRNA having an open reading frame encoding a concatemeric cancer antigen of interest, an mmRNA having an open reading frame encoding a polypeptide that enhances an immune response to the cancer antigen of interest, and a pharmaceutically acceptable carrier or excipient.

E249. A method for vaccinating a subject, comprising:

[1456] administering to a subject having cancer a personalized cancer vaccine or composition of any one of embodiments 198-248 in order to vaccinate the subject.

E250. A method for treating a subject with a personalized cancer vaccine, comprising isolating a sample from the subject, identifying a set of neoepitopes by analyzing a patient transcriptome and/or a patient exome from the sample to produce a patient specific mutanome, selecting a set of neoepitopes for the vaccine from the mutanome based on MHC binding strength, MHC binding diversity, predicted degree of immunogenicity, low self reactivity, and/or T cell reactivity, preparing a mRNA to encode the set of neoepitopes and a polypeptide that enhances an immune response to the neoepitopes, and administering the personalized cancer vaccine to the subject within two months of isolating the sample from the subject.
E251. The method of embodiment 250, wherein the personalized cancer vaccine is administered to the subject within one month of isolating the sample from the subject.
E252. The method of embodiment 250 or 251, wherein the personalized cancer vaccine further encodes one or more traditional cancer antigens.
E253. The method of embodiment 252, wherein the one or more traditional cancer antigens are encoded by the same mRNA that encode the set of neoepitopes.
E254. The method of embodiment 252, wherein the one or more traditional cancer antigens are encoded by a different mRNA than the mRNA which encodes the set of neoeptiopes.
E255. The method of any one of embodiments 250-254, wherein the personalized cancer vaccine is administered in combination with a cancer therapeutic agent.
E256. The method of embodiment 255, wherein the cancer therapeutic agent is a traditional cancer vaccine.
E257. A bacterial vaccine comprising a first chemically modified messenger RNA (mmRNA) encoding a polypeptide that enhances an immune response to at least one bacterial antigen of interest, and a second mmRNA encoding the at least one bacterial antigen of interest, wherein each mmRNA comprises one or more modified nucleobases, and wherein the immune response comprises a cellular or humoral immune response characterized by:

[1457] (i) stimulating Type I interferon pathway signaling;

[1458] (ii) stimulating NFkB pathway signaling;

[1459] (iii) stimulating an inflammatory response;

[1460] (iv) stimulating cytokine production; or

[1461] (v) stimulating dendritic cell development, activity or mobilization; and

[1462] (vi) a combination of any of (i)-(vi).

E258. The bacterial vaccine of embodiment 257, which comprises a single mmRNA construct encoding both the at least one bacterial antigen of interest and the polypeptide that enhances an immune response to the at least one bacterial antigen of interest.
E259. The bacterial vaccine of embodiment 257 or 258, wherein the at least one bacterial antigen of interest is a concatemeric bacterial antigen comprised of 2-10 bacterial antigens.
E260. The bacterial vaccine of embodiment 259, wherein the concatemeric bacterial antigen comprises one or more of:

[1463] a) the 2-10 bacterial antigens are interspersed by cleavage sensitive sites;

[1464] b) the mmRNA encoding each bacterial antigen is linked directly to one another without a linker; and/or

[1465] c) the mmRNA encoding each bacterial antigen is linked to one or another with a single nucleotide linker.

E261. The bacterial vaccine of any one of embodiments 257-260, further comprising a ubiquitination signal.
E262. The bacterial vaccine of embodiment 261, wherein the ubiquitination signal is located at the C-terminus of the mmRNA.
E263. The bacterial vaccine of any one of embodiments 260-262, wherein at least one of the cleavage sites is an APC cleavage site.
E264. The bacterial vaccine of embodiment 263, wherein the cleavage site is a cleavage site for a serine protease, a threonine protease, a cysteine protease, an aspartate protease, a glutamic acid protease, or a metalloprotease.
E265. The bacterial vaccine of embodiment 264, wherein the cleavage site is for a cysteine protease.
E266. The bacterial vaccine of embodiment 265, wherein the cysteine protease is cathepsin B.
E267. The bacterial vaccine of embodiment 263, wherein the cleavage site comprises the amino acid sequence GFLG, Arg-↓-NHMec; Bz-Arg-↓-NhNap; Bz-Arg-↓NHMec; Bz-Phe-Cal-Arg-↓-NHMec; Pro-Gly-↓-Phe; Xaa-Xaa-Val-Val-Arg-Xaa-X or Arg-Arg, wherein Xaa is any amino acid residue.
E268. The bacterial vaccine of any one of embodiments 257-267, further comprising a recall antigen.
E269. The bacterial vaccine of embodiment 268, wherein the recall antigen is an infectious disease antigen.
E270. The bacterial vaccine of embodiment 268 or 269, wherein the recall antigen is an mRNA having an open reading frame encoding the recall antigen.
E271. The bacterial vaccine of any one of embodiments 268-270, wherein the recall antigen is included in the concatemeric antigen.
E272. The bacterial vaccine of anyone of embodiments 268-271, wherein the recall antigen is an influenza antigen.
E273. The bacterial vaccine of any one of embodiments 257-272, further comprising an endosomal targeting sequence.
E274. The bacterial vaccine of embodiment 273, wherein the endosomal targeting sequence comprises at least a portion of the transmembrane domain of lysosome associated membrane protein (LAMP-1).
E275. The bacterial vaccine of embodiment 273, wherein the endosomal targeting sequence comprises at least a portion of the transmembrane domain of invariant chain (Ii).
E276. The bacterial vaccine of any one of embodiments 257-275, wherein the vaccine induces a humoral immune response.
E277. The bacterial vaccine of any one of embodiments 257-275, wherein the vaccine induces an adaptive immune response.
E278. The bacterial vaccine of embodiment 277, wherein the adaptive immune response comprises induction of antigen-specific antibody production or antigen-specific induction/activation of T helper lymphocytes or cytotoxic lymphocytes.
E279. The bacterial vaccine of any one of embodiments 257-278, wherein the bacterial antigen of interested is derived from Staphylococcus aureus.
E280. A composition comprising the bacterial vaccine of any one of embodiments 257-279.
E281. The composition of embodiment 280, wherein each mmRNA is formulated in the same or different lipid nanoparticle.
E282. The composition of embodiment 281, wherein each mmRNA encoding a bacterial antigen of interest is formulated in the same or different lipid nanoparticle.
E283. The composition of embodiment 282, wherein each mmRNA encoding a polypeptide that enhances an immune response to the bacterial antigen of interest is formulated in the same or different lipid nanoparticle.
E284. The composition of any one of embodiments 281-283, wherein each mmRNA encoding a bacterial antigen of interest is formulated in the same lipid nanoparticle, and each mmRNA encoding a polypeptide that enhances an immune response to the bacterial antigen is formulated in a different lipid nanoparticle.
E285. The composition of any one of embodiments 281-283, wherein each mmRNA encoding a bacterial antigen of interest is formulated in the same lipid nanoparticle, and each mmRNA encoding a polypeptide that enhances an immune response to the bacterial antigen is formulated in the same lipid nanoparticle as each mmRNA encoding a bacterial antigen.
E286. The composition of any one of embodiments 281-283, wherein each mmRNA encoding a bacterial antigen is formulated in a different lipid nanoparticle, and each mmRNA encoding a polypeptide that enhances an immune response to the bacterial antigen is formulated in the same lipid nanoparticle as each mmRNA encoding each bacterial antigen.
E287. A lipid nanoparticle carrier comprising a pharmaceutical composition, wherein the pharmaceutical composition comprises:

[1466] an mmRNA having an open reading frame encoding a concatemer of bacterial antigens;

[1467] an mmRNA having an open reading frame encoding a polypeptide that enhances an immune response to the concatemer of bacterial antigens; and

[1468] a pharmaceutically acceptable carrier or excipient.

E288. A lipid nanoparticle carrier comprising a pharmaceutical composition, wherein the pharmaceutical composition comprises:

[1469] at least one mmRNA having an open reading frame encoding bacterial antigen;

[1470] an mmRNA having an open reading frame encoding a polypeptide that enhances an immune response to the bacterial antigen; and

[1471] a pharmaceutically acceptable carrier or excipient.

E289. A bacterial vaccine comprising:

[1472] a nanoparticle comprising a pharmaceutical composition, wherein the pharmaceutical composition comprises an mmRNA having an open reading frame encoding a bacterial antigen of interest, an mmRNA having an open reading frame encoding a polypeptide that enhances an immune response to the bacterial antigen of interest, and a pharmaceutically acceptable carrier or excipient.

E290. A bacterial vaccine comprising:

[1473] a nanoparticle comprising a pharmaceutical composition, wherein the pharmaceutical composition comprises an mmRNA having an open reading frame encoding a concatemeric bacterial antigen of interest, an mmRNA having an open reading frame encoding a polypeptide that enhances an immune response to the concatemeric bacterial antigen of interest, and a pharmaceutically acceptable carrier or excipient.

E291. A method for vaccinating a subject against infection by a bacterium of interest, comprising:

[1474] administering to the subject a bacterial vaccine, composition, or lipid nanoparticle carrier of any one of embodiments 257-290 in order to vaccinate the subject.

E292. The method of embodiment 291, wherein the bacterium of interest is Staphylococcus aureus.
E293. The method of embodiment 291, wherein the bacterium of interest is Methicillin Resistant Staphylococcus aureus (MRSA).
E294. A method for treating a subject with a bacterial infection, comprising:

[1475] administering to the subject a bacterial vaccine, composition, or lipid nanoparticle carrier of any one of embodiments 257-290 in order to treat the subject.

E295. The method of embodiment 294, wherein the bacterial infection is caused by Staphylococcus aureus.
E296. The method of embodiment 294, wherein the bacterial infection is caused by Methicillin Resistant Staphylococcus aureus (MRSA).

### Definitions

[1476] Administering: As used herein, “administering” refers to a method of delivering a composition to a subject or patient. A method of administration may be selected to target delivery (e.g., to specifically deliver) to a specific region or system of a body. For example, an administration may be parenteral (e.g., subcutaneous, intracutaneous, intravenous, intraperitoneal, intramuscular, intraarticular, intraarterial, intrasynovial, intrasternal, intrathecal, intralesional, or intracranial injection, as well as any suitable infusion technique), oral, trans- or intra-dermal, interdermal, rectal, intravaginal, topical (e.g. by powders, ointments, creams, gels, lotions, and/or drops), mucosal, nasal, buccal, enteral, vitreal, intratumoral, sublingual, intranasal; by intratracheal instillation, bronchial instillation, and/or inhalation; as an oral spray and/or powder, nasal spray, and/or aerosol, and/or through a portal vein catheter.

[1477] Approximately, about: As used herein, the terms “approximately” or “about,” as applied to one or more values of interest, refers to a value that is similar to a stated reference value. In certain embodiments, the term “approximately” or “about” refers to a range of values that fall within 25%, 20%, 19%, 18%, 17%, 16%, 15%, 14%, 13%, 12%, 11%, 10%, 9%, 8%, 7%, 6%, 5%, 4%, 3%, 2%, 1%, or less in either direction (greater than or less than) of the stated reference value unless otherwise stated or otherwise evident from the context (except where such number would exceed 100% of a possible value).

[1478] Cancer: As used herein, “cancer” is a condition involving abnormal and/or unregulated cell growth. The term cancer encompasses benign and malignant cancers. Exemplary non-limiting cancers include adrenal cortical cancer, advanced cancer, anal cancer, aplastic anemia, bileduct cancer, bladder cancer, bone cancer, bone metastasis, brain tumors, brain cancer, breast cancer, childhood cancer, cancer of unknown primary origin, Castleman disease, cervical cancer, colorectal cancer, endometrial cancer, esophagus cancer, Ewing family of tumors, eye cancer, gallbladder cancer, gastrointestinal carcinoid tumors, gastrointestinal stromal tumors, gestational trophoblastic disease, Hodgkin disease, Kaposi sarcoma, renal cell carcinoma, laryngeal and hypopharyngeal cancer, acute lymphocytic leukemia, acute myeloid leukemia, chronic lymphocytic leukemia, chronic myeloid leukemia, chronic myelomonocytic leukemia, myelodysplastic syndrome (including refractory anemias and refractory cytopenias), myeloproliferative neoplasms or diseases (including polycythemia vera, essential thrombocytosis and primary myelofibrosis), liver cancer (e.g., hepatocellular carcinoma), non-small cell lung cancer, small cell lung cancer, lung carcinoid tumor, lymphoma of the skin, malignant mesothelioma, multiple myeloma, myelodysplasia syndrome, nasal cavity and paranasal sinus cancer, nasopharyngeal cancer, neuroblastoma, non-Hodgkin lymphoma, oral cavity and oropharyngeal cancer, osteosarcoma, ovarian cancer, pancreatic cancer, penile cancer, pituitary tumors, prostate cancer, retinoblastoma, rhabdomyosarcoma, salivary gland cancer, sarcoma in adult soft tissue, basal and squamous cell skin cancer, melanoma, small intestine cancer, stomach cancer, testicular cancer, throat cancer, thymus cancer, thyroid cancer, uterine sarcoma, vaginal cancer, vulvar cancer, Waldenstrom macroglobulinemia, Wilms tumor and secondary cancers caused by cancer treatment. In particular embodiments, the cancer is liver cancer (e.g., hepatocellular carcinoma) or colorectal cancer. In other embodiments, the cancer is a blood-based cancer or a hematopoetic cancer.

[1479] Cleavable Linker: As used herein, the term “cleavable linker” refers to a linker, typically a peptide linker (e.g., about 5-30 amino acids in length, typically about 10-20 amino acids in length) that can be incorporated into multicistronic mRNA constructs such that equimolar levels of multiple genes can be produced from the same mRNA. Non-limiting examples of cleavable linkers include the 2A family of peptides, including F2A, P2A, T2A and E2A, first discovered in picornaviruses, that when incorporated into an mRNA construct (e.g., between two polypeptide domains) function by making the ribosome skip the synthesis of a peptide bond at C-terminus of the 2A element, thereby leading to separation between the end of the 2A sequence and the next peptide downstream.

[1480] Conjugated: As used herein, the term “conjugated,” when used with respect to two or more moieties, means that the moieties are physically associated or connected with one another, either directly or via one or more additional moieties that serves as a linking agent, to form a structure that is sufficiently stable so that the moieties remain physically associated under the conditions in which the structure is used, e.g., physiological conditions. In some embodiments, two or more moieties may be conjugated by direct covalent chemical bonding. In other embodiments, two or more moieties may be conjugated by ionic bonding or hydrogen bonding.

[1481] Contacting: As used herein, the term “contacting” means establishing a physical connection between two or more entities. For example, contacting a cell with an mRNA or a lipid nanoparticle composition means that the cell and mRNA or lipid nanoparticle are made to share a physical connection. Methods of contacting cells with external entities both in vivo, in vitro, and ex vivo are well known in the biological arts. In exemplary embodiments of the disclosure, the step of contacting a mammalian cell with a composition (e.g., an isolated mRNA, nanoparticle, or pharmaceutical composition of the disclosure) is performed in vivo. For example, contacting a lipid nanoparticle composition and a cell (for example, a mammalian cell) which may be disposed within an organism (e.g., a mammal) may be performed by any suitable administration route (e.g., parenteral administration to the organism, including intravenous, intramuscular, intradermal, and subcutaneous administration). For a cell present in vitro, a composition (e.g., a lipid nanoparticle or an isolated mRNA) and a cell may be contacted, for example, by adding the composition to the culture medium of the cell and may involve or result in transfection. Moreover, more than one cell may be contacted by a nanoparticle composition.

[1482] Encapsulate: As used herein, the term “encapsulate” means to enclose, surround, or encase. In some embodiments, a compound, polynucleotide (e.g., an mRNA), or other composition may be fully encapsulated, partially encapsulated, or substantially encapsulated. For example, in some embodiments, an mRNA of the disclosure may be encapsulated in a lipid nanoparticle, e.g., a liposome.

[1483] Effective amount: As used herein, the term “effective amount” of an agent is that amount sufficient to effect beneficial or desired results, for example, clinical results, and, as such, an “effective amount” depends upon the context in which it is being applied. For example, in the context of administering an agent that treats cancer, an effective amount of an agent is, for example, an amount sufficient to achieve treatment, as defined herein, of cancer, as compared to the response obtained without administration of the agent. In some embodiments, a therapeutically effective amount is an amount of an agent to be delivered (e.g., nucleic acid, drug, therapeutic agent, diagnostic agentor prophylactic agent) that is sufficient, when administered to a subject suffering from or susceptible to an infection, disease, disorder, and/or condition, to treat, improve symptoms of, diagnose, prevent, and/or delay the onset of the infection, disease, disorder, and/or condition.

[1484] Expression: As used herein, “expression” of a nucleic acid sequence refers to one or more of the following events: (1) production of an RNA template from a DNA sequence (e.g., by transcription); (2) processing of an RNA transcript (e.g., by splicing, editing, 5′ cap formation, and/or 3′ end processing); (3) translation of an RNA into a polypeptide or protein; and (4) post-translational modification of a polypeptide or protein.

[1485] Identity: As used herein, the term “identity” refers to the overall relatedness between polymeric molecules, e.g., between polynucleotide molecules (e.g., DNA molecules and/or RNA molecules) and/or between polypeptide molecules. Calculation of the percent identity of two polynucleotide sequences, for example, can be performed by aligning the two sequences for optimal comparison purposes (e.g., gaps can be introduced in one or both of a first and a second nucleic acid sequences for optimal alignment and non-identical sequences can be disregarded for comparison purposes). In certain embodiments, the length of a sequence aligned for comparison purposes is at least 30%, at least 40%, at least 50%, at least 60%, at least 70%, at least 80%, at least 90%, at least 95%, or 100% of the length of the reference sequence. The nucleotides at corresponding nucleotide positions are then compared. When a position in the first sequence is occupied by the same nucleotide as the corresponding position in the second sequence, then the molecules are identical at that position. The percent identity between the two sequences is a function of the number of identical positions shared by the sequences, taking into account the number of gaps, and the length of each gap which needs to be introduced for optimal alignment of the two sequences. The comparison of sequences and determination of percent identity between two sequences can be accomplished using a mathematical algorithm. For example, the percent identity between two nucleotide sequences can be determined using methods such as those described in Computational Molecular Biology, Lesk, A. M., ed., Oxford University Press, New York, 1988; Biocomputing: Informatics and Genome Projects, Smith, D. W., ed., Academic Press, New York, 1993; Sequence Analysis in Molecular Biology, von Heinje, G., Academic Press, 1987; Computer Analysis of Sequence Data, Part I, Griffin, A. M., and Griffin, H. G., eds., Humana Press, New Jersey, 1994; and Sequence Analysis Primer, Gribskov, M. and Devereux, J., eds., M Stockton Press, New York, 1991; each of which is incorporated herein by reference. For example, the percent identity between two nucleotide sequences can be determined using the algorithm of Meyers and Miller (CABIOS, 1989, 4:11-17), which has been incorporated into the ALIGN program (version 2.0) using a PAM120 weight residue table, a gap length penalty of 12 and a gap penalty of 4. The percent identity between two nucleotide sequences can, alternatively, be determined using the GAP program in the GCG software package using an NWSgapdna.CMP matrix. Methods commonly employed to determine percent identity between sequences include, but are not limited to those disclosed in Carillo, H., and Lipman, D., SIAM J Applied Math., 48:1073 (1988); incorporated herein by reference. Techniques for determining identity are codified in publicly available computer programs. Exemplary computer software to determine homology between two sequences include, but are not limited to, GCG program package, Devereux et al., Nucleic Acids Research, 12(1): 387, 1984, BLASTP, BLASTN, and FASTA, Altschul, S. F. et al., J. Molec. Biol., 215, 403, 1990.

[1486] Fragment: A “fragment,” as used herein, refers to a portion. For example, fragments of proteins may include polypeptides obtained by digesting full-length protein isolated from cultured cells or obtained through recombinant DNA techniques.

[1487] GC-rich: As used herein, the term “GC-rich” refers to the nucleobase composition of a polynucleotide (e.g., mRNA), or any portion thereof (e.g., an RNA element), comprising guanine (G) and/or cytosine (C) nucleobases, or derivatives or analogs thereof, wherein the GC-content is greater than about 50%. The term “GC-rich” refers to all, or to a portion, of a polynucleotide, including, but not limited to, a gene, a non-coding region, a 5′ UTR, a 3′ UTR, an open reading frame, an RNA element, a sequence motif, or any discrete sequence, fragment, or segment thereof which comprises about 50% GC-content. In some embodiments of the disclosure, GC-rich polynucleotides, or any portions thereof, are exclusively comprised of guanine (G) and/or cytosine (C) nucleobases.

[1488] GC-content: As used herein, the term “GC-content” refers to the percentage of nucleobases in a polynucleotide (e.g., mRNA), or a portion thereof (e.g., an RNA element), that are either guanine (G) and cytosine (C) nucleobases, or derivatives or analogs thereof, (from a total number of possible nucleobases, including adenine (A) and thymine (T) or uracil (U), and derivatives or analogs thereof, in DNA and in RNA). The term “GC-content” refers to all, or to a portion, of a polynucleotide, including, but not limited to, a gene, a non-coding region, a 5′ or 3′ UTR, an open reading frame, an RNA element, a sequence motif, or any discrete sequence, fragment, or segment thereof.

[1489] Genetic Adjuvant: A “genetic adjuvant”, as used herein, refers to an mRNA construct (e.g., an mmRNA construct) that enhances the immune response to a vaccine, for example by stimulating cytokine production and/or by stimulating the production of antigen-specific effector cells (e.g., CD8 T cells). A genetic adjuvant mRNA construct can, for example, encode a polypeptide that stimulates Type I interferon (e.g., activates Type I interferon pathway signaling) or that promotes dendritic cell development or activity.

[1490] Heterologous: As used herein, “heterologous” indicates that a sequence (e.g., an amino acid sequence or the polynucleotide that encodes an amino acid sequence) is not normally present in a given polypeptide or polynucleotide. For example, an amino acid sequence that corresponds to a domain or motif of one protein may be heterologous to a second protein.

[1491] Hydrophobic amino acid: As used herein, a “hydrophobic amino acid” is an amino acid having an uncharged, nonpolar side chain. Examples of naturally occurring hydrophobic amino acids are alanine (Ala), valine (Val), leucine (Leu), isoleucine (Ile), proline (Pro), phenylalanine (Phe), methionine (Met), and tryptophan (Trp).

[1492] Immune Potentiator: An “immune potentiator”, as used herein, refers to an mRNA construct (e.g., an mmRNA construct) that enhances an immune response, e.g., to an antigen of interest (either an endogenous antigen in a subject to which the immune potentiator is administered or to an exogenous antigen that is coadministered with the immune potentiator), for example by stimulating T cell, B cell or dendritic cell responses, including but not limited to cytokine production, stimulating antibody production or stimulating the production of antigen-specific immune cells (e.g., CD8⁺ T cells or CD4⁺ T cells).

[1493] Initiation Codon: As used herein, the term “initiation codon”, used interchangeably with the term “start codon”, refers to the first codon of an open reading frame that is translated by the ribosome and is comprised of a triplet of linked adenine-uracil-guanine nucleobases. The initiation codon is depicted by the first letter codes of adenine (A), uracil (U), and guanine (G) and is often written simply as “AUG”. Although natural mRNAs may use codons other than AUG as the initiation codon, which are referred to herein as “alternative initiation codons”, the initiation codons of polynucleotides described herein use the AUG codon. During the process of translation initiation, the sequence comprising the initiation codon is recognized via complementary base-pairing to the anticodon of an initiator tRNA (Met-tRNAᵢ^{Met}) bound by the ribosome. Open reading frames may contain more than one AUG initiation codon, which are referred to herein as “alternate initiation codons”.

[1494] The initiation codon plays a critical role in translation initiation. The initiation codon is the first codon of an open reading frame that is translated by the ribosome. Typically, the initiation codon comprises the nucleotide triplet AUG, however, in some instances translation initiation can occur at other codons comprised of distinct nucleotides. The initiation of translation in eukaryotes is a multistep biochemical process that involves numerous protein-protein, protein-RNA, and RNA-RNA interactions between messenger RNA molecules (mRNAs), the 40S ribosomal subunit, other components of the translation machinery (e.g., eukaryotic initiation factors; eIFs). The current model of mRNA translation initiation postulates that the pre-initiation complex (alternatively “43S pre-initiation complex”; abbreviated as “PIC”) translocates from the site of recruitment on the mRNA (typically the 5′ cap) to the initiation codon by scanning nucleotides in a 5′ to 3′ direction until the first AUG codon that resides within a specific translation-promotive nucleotide context (the Kozak sequence) is encountered (Kozak (1989) J Cell Biol 108:229-241). Scanning by the PIC ends upon complementary base-pairing between nucleotides comprising the anticodon of the initiator Met-tRNAᵢ^{Met} transfer RNA and nucleotides comprising the initiation codon of the mRNA. Productive base-pairing between the AUG codon and the Met-tRNAᵢ^{Met} anticodon elicits a series of structural and biochemical events that culminate in the joining of the large 60S ribosomal subunit to the PIC to form an active ribosome that is competent for translation elongation.

[1495] Insertion: As used herein, an “insertion” or an “addition” refers to a change in an amino acid or nucleotide sequence resulting in the addition of one or more amino acid residues or nucleotides, respectively, to a molecule as compared to a reference sequence, for example, the sequence found in a naturally-occurring molecule. For example, an amino acid sequence of a heterologous polypeptide (e.g., a BH3 domain) may be inserted into a scaffold polypeptide (e.g. a SteA scaffold polypeptide) at a site that is amenable to insertion. In some embodiments, an insertion may be a replacement, for example, if an amino acid sequence that forms a loop of a scaffold polypeptide (e.g., loop 1 or loop 2 of SteA or a SteA derivative) is replaced by an amino acid sequence of a heterologous polypeptide.

[1496] Insertion Site: As used herein, an “insertion site” is a position or region of a scaffold polypeptide that is amenable to insertion of an amino acid sequence of a heterologous polypeptide. It is to be understood that an insertion site also may refer to the position or region of the polynucleotide that encodes the polypeptide (e.g., a codon of a polynucleotide that codes for a given amino acid in the scaffold polypeptide). In some embodiments, insertion of an amino acid sequence of a heterologous polypeptide into a scaffold polypeptide has little to no effect on the stability (e.g., conformational stability), expression level, or overall secondary structure of the scaffold polypeptide.

[1497] Isolated: As used herein, the term “isolated” refers to a substance or entity that has been separated from at least some of the components with which it was associated (whether in nature or in an experimental setting). Isolated substances may have varying levels of purity in reference to the substances from which they have been associated. Isolated substances and/or entities may be separated from at least about 10%, about 20%, about 30%, about 40%, about 50%, about 60%, about 70%, about 80%, about 90%, or more of the other components with which they were initially associated. In some embodiments, isolated agents are more than about 80%, about 85%, about 90%, about 91%, about 92%, about 93%, about 94%, about 95%, about 96%, about 97%, about 98%, about 99%, or more than about 99% pure. As used herein, a substance is “pure” if it is substantially free of other components.

[1498] Kozak Sequence: The term “Kozak sequence” (also referred to as “Kozak consensus sequence”) refers to a translation initiation enhancer element to enhance expression of a gene or open reading frame, and which in eukaryotes, is located in the 5′ UTR. The Kozak consensus sequence was originally defined as the sequence GCCRCC, where R=a purine, following an analysis of the effects of single mutations surrounding the initiation codon (AUG) on translation of the preproinsulin gene (Kozak (1986) Cell 44:283-292). Polynucleotides disclosed herein comprise a Kozak consensus sequence, or a derivative or modification thereof. (Examples of translational enhancer compositions and methods of use thereof, see U.S. Pat. No. 5,807,707 to Andrews et al., incorporated herein by reference in its entirety; U.S. Pat. No. 5,723,332 to Chernajovsky, incorporated herein by reference in its entirety; U.S. Pat. No. 5,891,665 to Wilson, incorporated herein by reference in its entirety.)

[1499] Leaky scanning: A phenomenon known as “leaky scanning” can occur whereby the PIC bypasses the initiation codon and instead continues scanning downstream until an alternate or alternative initiation codon is recognized. Depending on the frequency of occurrence, the bypass of the initiation codon by the PIC can result in a decrease in translation efficiency. Furthermore, translation from this downstream AUG codon can occur, which will result in the production of an undesired, aberrant translation product that may not be capable of eliciting the desired therapeutic response. In some cases, the aberrant translation product may in fact cause a deleterious response (Kracht et al., (2017) Nat Med 23(4):501-507).

[1500] Liposome: As used herein, by “liposome” is meant a structure including a lipid-containing membrane enclosing an aqueous interior. Liposomes may have one or more lipid membranes. Liposomes include single-layered liposomes (also known in the art as unilamellar liposomes) and multi-layered liposomes (also known in the art as multilamellar liposomes).

[1501] Metastasis: As used herein, the term “metastasis” means the process by which cancer spreads from the place at which it first arose as a primary tumor to distant locations in the body. A secondary tumor that arose as a result of this process may be referred to as “a metastasis.” mRNA: As used herein, an “mRNA” refers to a messenger ribonucleic acid. An mRNA may be naturally or non-naturally occurring. For example, an mRNA may include modified and/or non-naturally occurring components such as one or more nucleobases, nucleosides, nucleotides, or linkers. An mRNA may include a cap structure, a chain terminating nucleoside, a stem loop, a polyA sequence, and/or a polyadenylation signal. An mRNA may have a nucleotide sequence encoding a polypeptide. Translation of an mRNA, for example, in vivo translation of an mRNA inside a mammalian cell, may produce a polypeptide. Traditionally, the basic components of an mRNA molecule include at least a coding region, a 5′-untranslated region (5′-UTR), a 3′UTR, a 5′ cap and a polyA sequence.

[1502] microRNA (miRNA): As used herein, a “microRNA (miRNA)” is a small non-coding RNA molecule which may function in post-transcriptional regulation of gene expression (e.g., by RNA silencing, such as by cleavage of the mRNA, destabilization of the mRNA by shortening its polyA tail, and/or by interfering with the efficiency of translation of the mRNA into a polypeptide by a ribosome). A mature miRNA is typically about 22 nucleotides long.

[1503] microRNA-122 (miR-122): As used herein, “microRNA-122 (miR-122)” refers to any native miR-122 from any vertebrate source, including, for example, humans, unless otherwise indicated. miR-122 is typically highly expressed in the liver, where it may regulate fatty-acid metabolism. miR-122 levels are reduced in liver cancer, for example, hepatocellular carcinoma. miR-122 is one of the most highly-expressed miRNAs in the liver, where it regulates targets including but not limited to CAT-1, CD320, AldoA, Hjv, Hfe, ADAM10, IGFR1, CCNG1, and ADAM17. Mature human miR-122 may have a sequence of AACGCCAUUAUCACACUAAAUA (SEQ ID NO: 32, corresponding to hsa-miR-122-3p) or UGGAGUGUGACAAUGGUGUUUG (SEQ ID NO: 33, corresponding to hsa-miR-122-5p).

[1504] microRNA-21 (miR-21): As used herein, “microRNA-21 (miR-21)” refers to any native miR-21 from any vertebrate source, including, for example, humans, unless otherwise indicated. miR-21 levels are increased in liver cancer, for example, hepatocellular carcinoma, as compared to normal liver. Mature human miR-21 may have a sequence of UAGCUUAUCAGACUGAUGUUGA (SEQ ID NO: 34, corresponding to has-miR-21-5p) or 5′-CAACACCAGUCGAUGGGCUGU-3′ (SEQ ID NO: 35, corresponding to has-miR-21-3p).

[1505] microRNA-142 (miR-142): As used herein, “microRNA-142 (miR-142)” refers to any native miR-142 from any vertebrate source, including, for example, humans, unless otherwise indicated. miR-142 is typically highly expressed in myeloid cells. Mature human miR-142 may have a sequence of UGUAGUGUUUCCUACUUUAUGGA (SEQ ID NO: 28, corresponding to hsa-miR-142-3p) or CAUAAAGUAGAAAGCACUACU (SEQ ID NO: 30, corresponding to hsa-miR-142-5p).

[1506] microRNA (miRNA) binding site: As used herein, a “microRNA (miRNA) binding site” refers to a miRNA target site or a miRNA recognition site, or any nucleotide sequence to which a miRNA binds or associates. In some embodiments, a miRNA binding site represents a nucleotide location or region of a polynucleotide (e.g., an mRNA) to which at least the “seed” region of a miRNA binds. It should be understood that “binding” may follow traditional Watson-Crick hybridization rules or may reflect any stable association of the miRNA with the target sequence at or adjacent to the microRNA site.

[1507] miRNA seed: As used herein, a “seed” region of a miRNA refers to a sequence in the region of positions 2-8 of a mature miRNA, which typically has perfect Watson-Crick complementarity to the miRNA binding site. A miRNA seed may include positions 2-8 or 2-7 of a mature miRNA. In some embodiments, a miRNA seed may comprise 7 nucleotides (e.g., nucleotides 2-8 of a mature miRNA), wherein the seed-complementary site in the corresponding miRNA binding site is flanked by an adenine (A) opposed to miRNA position 1. In some embodiments, a miRNA seed may comprise 6 nucleotides (e.g., nucleotides 2-7 of a mature miRNA), wherein the seed-complementary site in the corresponding miRNA binding site is flanked by an adenine (A) opposed to miRNA position 1. When referring to a miRNA binding site, an miRNA seed sequence is to be understood as having complementarity (e.g., partial, substantial, or complete complementarity) with the seed sequence of the miRNA that binds to the miRNA binding site.

[1508] Modified: As used herein “modified” or “modification” refers to a changed state or a change in composition or structure of a polynucleotide (e.g., mRNA) or molecule provided herein. Polynucleotides and molecules may be modified in various ways including chemically, structurally, and/or functionally. For example, polynucleotides may be structurally modified by the incorporation of one or more RNA elements, wherein the RNA element comprises a sequence and/or an RNA secondary structure(s) that provides one or more functions (e.g., translational regulatory activity). In some embodiments, the polynucleotides are modified by the introduction of non-natural nucleosides and/or nucleotides, e.g., as it relates to the natural ribonucleotides A, U, G and C. Noncanonical nucleotides such as the cap structures are not considered “modified” although they differ from the chemical structure of the A, C, G, U ribonucleotides. Accordingly, polynucleotides and molecules of the disclosure may be comprised of one or more modifications (e.g., may include one or more chemical, structural, or functional modifications, including any combination thereof).

[1509] Nanoparticle: As used herein, “nanoparticle” refers to a particle having any one structural feature on a scale of less than about 1000 nm that exhibits novel properties as compared to a bulk sample of the same material. Routinely, nanoparticles have any one structural feature on a scale of less than about 500 nm, less than about 200 nm, or about 100 nm. Also routinely, nanoparticles have any one structural feature on a scale of from about 50 nm to about 500 nm, from about 50 nm to about 200 nm or from about 70 to about 120 mn. In exemplary embodiments, a nanoparticle is a particle having one or more dimensions of the order of about 1-1000 nm. In other exemplary embodiments, a nanoparticle is a particle having one or more dimensions of the order of about 10-500 nm. In other exemplary embodiments, a nanoparticle is a particle having one or more dimensions of the order of about 50-200 nm. A spherical nanoparticle would have a diameter, for example, of between about 50-100 or 70-120 nanometers. A nanoparticle most often behaves as a unit in terms of its transport and properties. It is noted that novel properties that differentiate nanoparticles from the corresponding bulk material typically develop at a size scale of under 1000 nm, or at a size of about 100 nm, but nanoparticles can be of a larger size, for example, for particles that are oblong, tubular, and the like. Although the size of most molecules would fit into the above outline, individual molecules are usually not referred to as nanoparticles.

[1510] Nucleic acid: As used herein, the term “nucleic acid” is used in its broadest sense and encompasses any compound and/or substance that includes a polymer of nucleotides. These polymers are often referred to as polynucleotides. Exemplary nucleic acids or polynucleotides of the disclosure include, but are not limited to, ribonucleic acids (RNAs), deoxyribonucleic acids (DNAs), DNA-RNA hybrids, RNAi-inducing agents, RNAi agents, siRNAs, shRNAs, miRNAs, antisense RNAs, ribozymes, catalytic DNA, RNAs that induce triple helix formation, threose nucleic acids (TNAs), glycol nucleic acids (GNAs), peptide nucleic acids (PNAs), locked nucleic acids (LNAs, including LNA having a β-D-ribo configuration, α-LNA having an α-L-ribo configuration (a diastereomer of LNA), 2′-amino-LNA having a 2′-amino functionalization, and 2′-amino-α-LNA having a 2′-amino functionalization) or hybrids thereof. Furthermore, a nucleic acid may be in the form of a nucleic acid construct, such as a plasmid or a vector (e.g., viral vector, expression vector).

[1511] Nucleobase: As used herein, the term “nucleobase” (alternatively “nucleotide base” or “nitrogenous base”) refers to a purine or pyrimidine heterocyclic compound found in nucleic acids, including any derivatives or analogs of the naturally occurring purines and pyrimidines that confer improved properties (e.g., binding affinity, nuclease resistance, chemical stability) to a nucleic acid or a portion or segment thereof. Adenine, cytosine, guanine, thymine, and uracil are the nucleobases predominately found in natural nucleic acids. Other natural, non-natural, and/or synthetic nucleobases, as known in the art and/or described herein, can be incorporated into nucleic acids.

[1512] Nucleoside/Nucleotide: As used herein, the term “nucleoside” refers to a compound containing a sugar molecule (e.g., a ribose in RNA or a deoxyribose in DNA), or derivative or analog thereof, covalently linked to a nucleobase (e.g., a purine or pyrimidine), or a derivative or analog thereof (also referred to herein as “nucleobase”), but lacking an internucleoside linking group (e.g., a phosphate group). As used herein, the term “nucleotide” refers to a nucleoside covalently bonded to an internucleoside linking group (e.g., a phosphate group), or any derivative, analog, or modification thereof that confers improved chemical and/or functional properties (e.g., binding affinity, nuclease resistance, chemical stability) to a nucleic acid or a portion or segment thereof.

[1513] Open Reading Frame: As used herein, the term “open reading frame”, abbreviated as “ORF”, refers to a segment or region of an mRNA molecule that encodes a polypeptide. The ORF comprises a continuous stretch of non-overlapping, in-frame codons, beginning with the initiation codon and ending with a stop codon, and is translated by the ribosome.

[1514] Patient: As used herein, “patient” refers to a subject who may seek or be in need of treatment, requires treatment, is receiving treatment, will receive treatment, or a subject who is under care by a trained professional for a particular disease or condition. In particular embodiments, a patient is a human patient. In some embodiments, a patient is a patient suffering from cancer (e.g., liver cancer or colorectal cancer).

[1515] Pharmaceutically acceptable: The phrase “pharmaceutically acceptable” is employed herein to refer to those compounds, materials, compositions, and/or dosage forms which are, within the scope of sound medical judgment, suitable for use in contact with the tissues of human beings and animals without excessive toxicity, irritation, allergic response, or other problem or complication, commensurate with a reasonable benefit/risk ratio

[1516] Pharmaceutically acceptable excipient: The phrase “pharmaceutically acceptable excipient,” as used herein, refers any ingredient other than the compounds described herein (for example, a vehicle capable of suspending or dissolving the active compound) and having the properties of being substantially nontoxic and non-inflammatory in a patient. Excipients may include, for example: antiadherents, antioxidants, binders, coatings, compression aids, disintegrants, dyes (colors), emollients, emulsifiers, fillers (diluents), film formers or coatings, flavors, fragrances, glidants (flow enhancers), lubricants, preservatives, printing inks, sorbents, suspensing or dispersing agents, sweeteners, and waters of hydration. Exemplary excipients include, but are not limited to: butylated hydroxytoluene (BHT), calcium carbonate, calcium phosphate (dibasic), calcium stearate, croscarmellose, crosslinked polyvinyl pyrrolidone, citric acid, crospovidone, cysteine, ethylcellulose, gelatin, hydroxypropyl cellulose, hydroxypropyl methylcellulose, lactose, magnesium stearate, maltitol, mannitol, methionine, methylcellulose, methyl paraben, microcrystalline cellulose, polyethylene glycol, polyvinyl pyrrolidone, povidone, pregelatinized starch, propyl paraben, retinyl palmitate, shellac, silicon dioxide, sodium carboxymethyl cellulose, sodium citrate, sodium starch glycolate, sorbitol, starch (corn), stearic acid, sucrose, talc, titanium dioxide, vitamin A, vitamin E, vitamin C, and xylitol.

[1517] Pharmaceutically acceptable salts: As used herein, “pharmaceutically acceptable salts” refers to derivatives of the disclosed compounds wherein the parent compound is modified by converting an existing acid or base moiety to its salt form (e.g., by reacting the free base group with a suitable organic acid). Examples of pharmaceutically acceptable salts include, but are not limited to, mineral or organic acid salts of basic residues such as amines; alkali or organic salts of acidic residues such as carboxylic acids; and the like. Representative acid addition salts include acetate, acetic acid, adipate, alginate, ascorbate, aspartate, benzenesulfonate, benzene sulfonic acid, benzoate, bisulfate, borate, butyrate, camphorate, camphorsulfonate, citrate, cyclopentanepropionate, digluconate, dodecylsulfate, ethanesulfonate, fumarate, glucoheptonate, glycerophosphate, hemisulfate, heptonate, hexanoate, hydrobromide, hydrochloride, hydroiodide, 2-hydroxy-ethanesulfonate, lactobionate, lactate, laurate, lauryl sulfate, malate, maleate, malonate, methanesulfonate, 2-naphthalenesulfonate, nicotinate, nitrate, oleate, oxalate, palmitate, pamoate, pectinate, persulfate, 3-phenylpropionate, phosphate, picrate, pivalate, propionate, stearate, succinate, sulfate, tartrate, thiocyanate, toluenesulfonate, undecanoate, valerate salts, and the like. Representative alkali or alkaline earth metal salts include sodium, lithium, potassium, calcium, magnesium, and the like, as well as nontoxic ammonium, quaternary ammonium, and amine cations, including, but not limited to ammonium, tetramethylammonium, tetraethylammonium, methylamine, dimethylamine, trimethylamine, triethylamine, ethylamine, and the like. The pharmaceutically acceptable salts of the present disclosure include the conventional non-toxic salts of the parent compound formed, for example, from non-toxic inorganic or organic acids. The pharmaceutically acceptable salts of the present disclosure can be synthesized from the parent compound which contains a basic or acidic moiety by conventional chemical methods. Generally, such salts can be prepared by reacting the free acid or base forms of these compounds with a stoichiometric amount of the appropriate base or acid in water or in an organic solvent, or in a mixture of the two; generally, nonaqueous media like ether, ethyl acetate, ethanol, isopropanol, or acetonitrile are preferred. Lists of suitable salts are found in Remington's Pharmaceutical Sciences, 17th ed., Mack Publishing Company, Easton, Pa., 1985, p. 1418, Pharmaceutical Salts: Properties, Selection, and Use, P. H. Stahl and C. G. Wermuth (eds.), Wiley-VCH, 2008, and Berge et al., Journal of Pharmaceutical Science, 66, 1-19 (1977), each of which is incorporated herein by reference in its entirety.

[1518] Polypeptide: As used herein, the term “polypeptide” or “polypeptide of interest” refers to a polymer of amino acid residues typically joined by peptide bonds that can be produced naturally (e.g., isolated or purified) or synthetically.

[1519] Pre-Initiation Complex (PIC): As used herein, the term “pre-initiation complex” (alternatively “43S pre-initiation complex”; abbreviated as “PIC”) refers to a ribonucleoprotein complex comprising a 40S ribosomal subunit, eukaryotic initiation factors (eIF1, eIF1A, eIF3, eIF5), and the eIF2-GTP-Met-tRNAᵢ^{Met} ternary complex, that is intrinsically capable of attachment to the 5′ cap of an mRNA molecule and, after attachment, of performing ribosome scanning of the 5′ UTR.

[1520] RNA element: As used herein, the term “RNA element” refers to a portion, fragment, or segment of an RNA molecule that provides a biological function and/or has biological activity (e.g., translational regulatory activity). Modification of a polynucleotide by the incorporation of one or more RNA elements, such as those described herein, provides one or more desirable functional properties to the modified polynucleotide. RNA elements, as described herein, can be naturally-occurring, non-naturally occurring, synthetic, engineered, or any combination thereof. For example, naturally-occurring RNA elements that provide a regulatory activity include elements found throughout the transcriptomes of viruses, prokaryotic and eukaryotic organisms (e.g., humans). RNA elements in particular eukaryotic mRNAs and translated viral RNAs have been shown to be involved in mediating many functions in cells. Exemplary natural RNA elements include, but are not limited to, translation initiation elements (e.g., internal ribosome entry site (IRES), see Kieft et al., (2001) RNA 7(2):194-206), translation enhancer elements (e.g., the APP mRNA translation enhancer element, see Rogers et al., (1999) J Biol Chem 274(10):6421-6431), mRNA stability elements (e.g., AU-rich elements (AREs), see Garneau et al., (2007) Nat Rev Mol Cell Biol 8(2): 113-126), translational repression element (see e.g., Blumer et al., (2002) Mech Dev 110(1-2):97-112), protein-binding RNA elements (e.g., iron-responsive element, see Selezneva et al., (2013) J Mol Biol 425(18):3301-3310), cytoplasmic polyadenylation elements (Villalba et al., (2011) Curr Opin Genet Dev 21(4):452-457), and catalytic RNA elements (e.g., ribozymes, see Scott et al., (2009) Biochim Biophys Acta 1789(9-10):634-641).

[1521] Residence time: As used herein, the term “residence time” refers to the time of occupancy of a pre-initiation complex (PIC) or a ribosome at a discrete position or location along an mRNA molecule.

[1522] Subject: As used herein, the term “subject” refers to any organism to which a composition in accordance with the disclosure may be administered, e.g., for experimental, diagnostic, prophylactic, and/or therapeutic purposes. Typical subjects include animals (e.g., mammals such as mice, rats, rabbits, non-human primates, and humans) and/or plants. In some embodiments, a subject may be a patient.

[1523] Substantially: As used herein, the term “substantially” refers to the qualitative condition of exhibiting total or near-total extent or degree of a characteristic or property of interest. One of ordinary skill in the biological arts will understand that biological and chemical phenomena rarely, if ever, go to completion and/or proceed to completeness or achieve or avoid an absolute result. The term “substantially” is therefore used herein to capture the potential lack of completeness inherent in many biological and chemical phenomena.

[1524] Suffering from: An individual who is “suffering from” a disease, disorder, and/or condition has been diagnosed with or displays one or more symptoms of a disease, disorder, and/or condition.

[1525] Targeting moiety: As used herein, a “targeting moiety” is a compound or agent that may target a nanoparticle to a particular cell, tissue, and/or organ type.

[1526] Therapeutic Agent: The term “therapeutic agent” refers to any agent that, when administered to a subject, has a therapeutic, diagnostic, and/or prophylactic effect and/or elicits a desired biological and/or pharmacological effect.

[1527] Transfection: As used herein, the term “transfection” refers to methods to introduce a species (e.g., a polynucleotide, such as a mRNA) into a cell.

[1528] Translational Regulatory Activity: As used herein, the term “translational regulatory activity” (used interchangeably with “translational regulatory function”) refers to a biological function, mechanism, or process that modulates (e.g., regulates, influences, controls, varies) the activity of the translational apparatus, including the activity of the PIC and/or ribosome. In some aspects, the desired translation regulatory activity promotes and/or enhances the translational fidelity of mRNA translation. In some aspects, the desired translational regulatory activity reduces and/or inhibits leaky scanning. Subject: As used herein, the term “subject” refers to any organism to which a composition in accordance with the disclosure may be administered, e.g., for experimental, diagnostic, prophylactic, and/or therapeutic purposes. Typical subjects include animals (e.g., mammals such as mice, rats, rabbits, non-human primates, and humans) and/or plants. In some embodiments, a subject may be a patient.

[1529] Treating: As used herein, the term “treating” refers to partially or completely alleviating, ameliorating, improving, relieving, delaying onset of, inhibiting progression of, reducing severity of, and/or reducing incidence of one or more symptoms or features of a particular infection, disease, disorder, and/or condition. For example, “treating” cancer may refer to inhibiting survival, growth, and/or spread of a tumor. Treatment may be administered to a subject who does not exhibit signs of a disease, disorder, and/or condition and/or to a subject who exhibits only early signs of a disease, disorder, and/or condition for the purpose of decreasing the risk of developing pathology associated with the disease, disorder, and/or condition.

[1530] Preventing: As used herein, the term “preventing” refers to partially or completely inhibiting the onset of one or more symptoms or features of a particular infection, disease, disorder, and/or condition.

[1531] Tumor: As used herein, a “tumor” is an abnormal growth of tissue, whether benign or malignant.

[1532] Unmodified: As used herein, “unmodified” refers to any substance, compound or molecule prior to being changed in any way. Unmodified may, but does not always, refer to the wild type or native form of a biomolecule. Molecules may undergo a series of modifications whereby each modified molecule may serve as the “unmodified” starting molecule for a subsequent modification.

[1533] Uridine Content: The terms “uridine content” or “uracil content” are interchangeable and refer to the amount of uracil or uridine present in a certain nucleic acid sequence. Uridine content or uracil content can be expressed as an absolute value (total number of uridine or uracil in the sequence) or relative (uridine or uracil percentage respect to the total number of nucleobases in the nucleic acid sequence).

[1534] Uridine-Modified Sequence: The terms “uridine-modified sequence” refers to a sequence optimized nucleic acid (e.g., a synthetic mRNA sequence) with a different overall or local uridine content (higher or lower uridine content) or with different uridine patterns (e.g., gradient distribution or clustering) with respect to the uridine content and/or uridine patterns of a candidate nucleic acid sequence. In the content of the present disclosure, the terms “uridine-modified sequence” and “uracil-modified sequence” are considered equivalent and interchangeable.

[1535] A “high uridine codon” is defined as a codon comprising two or three uridines, a “low uridine codon” is defined as a codon comprising one uridine, and a “no uridine codon” is a codon without any uridines. In some embodiments, a uridine-modified sequence comprises substitutions of high uridine codons with low uridine codons, substitutions of high uridine codons with no uridine codons, substitutions of low uridine codons with high uridine codons, substitutions of low uridine codons with no uridine codons, substitution of no uridine codons with low uridine codons, substitutions of no uridine codons with high uridine codons, and combinations thereof. In some embodiments, a high uridine codon can be replaced with another high uridine codon. In some embodiments, a low uridine codon can be replaced with another low uridine codon. In some embodiments, a no uridine codon can be replaced with another no uridine codon. A uridine-modified sequence can be uridine enriched or uridine rarefied.

[1536] Uridine Enriched: As used herein, the terms “uridine enriched” and grammatical variants refer to the increase in uridine content (expressed in absolute value or as a percentage value) in a sequence optimized nucleic acid (e.g., a synthetic mRNA sequence) with respect to the uridine content of the corresponding candidate nucleic acid sequence. Uridine enrichment can be implemented by substituting codons in the candidate nucleic acid sequence with synonymous codons containing less uridine nucleobases. Uridine enrichment can be global (i.e., relative to the entire length of a candidate nucleic acid sequence) or local (i.e., relative to a subsequence or region of a candidate nucleic acid sequence).

[1537] Uridine Rarefied: As used herein, the terms “uridine rarefied” and grammatical variants refer to a decrease in uridine content (expressed in absolute value or as a percentage value) in an sequence optimized nucleic acid (e.g., a synthetic mRNA sequence) with respect to the uridine content of the corresponding candidate nucleic acid sequence. Uridine rarefication can be implemented by substituting codons in the candidate nucleic acid sequence with synonymous codons containing less uridine nucleobases. Uridine rarefication can be global (i.e., relative to the entire length of a candidate nucleic acid sequence) or local (i.e., relative to a subsequence or region of a candidate nucleic acid sequence).

### Equivalents and Scope

[1538] Those skilled in the art will recognize, or be able to ascertain using no more than routine experimentation, many equivalents to the specific embodiments in accordance with the disclosure described herein. The scope of the present disclosure is not intended to be limited to the Description below, but rather is as set forth in the appended claims.

[1539] In the claims, articles such as “a,” “an,” and “the” may mean one or more than one unless indicated to the contrary or otherwise evident from the context. Claims or descriptions that include “or” between one or more members of a group are considered satisfied if one, more than one, or all of the group members are present in, employed in, or otherwise relevant to a given product or process unless indicated to the contrary or otherwise evident from the context. The disclosure includes embodiments in which exactly one member of the group is present in, employed in, or otherwise relevant to a given product or process. The disclosure includes embodiments in which more than one, or all of the group members are present in, employed in, or otherwise relevant to a given product or process.

[1540] It is also noted that the term “comprising” is intended to be open and permits but does not require the inclusion of additional elements or steps. When the term “comprising” is used herein, the term “consisting of” is thus also encompassed and disclosed.

[1541] Where ranges are given, endpoints are included. Furthermore, it is to be understood that unless otherwise indicated or otherwise evident from the context and understanding of one of ordinary skill in the art, values that are expressed as ranges can assume any specific value or subrange within the stated ranges in different embodiments of the disclosure, to the tenth of the unit of the lower limit of the range, unless the context clearly dictates otherwise.

[1542] All cited sources, for example, references, publications, databases, database entries, and art cited herein, are incorporated into this application by reference, even if not expressly stated in the citation. In case of conflicting statements of a cited source and the instant application, the statement in the instant application shall control.

### EXAMPLES

[1543] The disclosure will be more fully understood by reference to the following examples. They should not, however, be construed as limiting the scope of the disclosure. It is understood that the examples and embodiments described herein are for illustrative purposes only and that various modifications or changes in light thereof will be suggested to persons skilled in the art and are to be included within the spirit and purview of this application and scope of the appended claims.

### Example 1: STING Immune Potentiator mRNA Constructs

[1544] In this example, a series of mmRNA constructs that encoded constitutively activated forms of human STING were made and tested for their ability to stimulate interferon-β (IFN-β) production. The human STING protein encoded by the constructs was constitutively activated through introduction of one or more point mutations. The following single or combination point mutations were tested: (i) V155M; (ii) R284T; (iii) V147L/N154S/V155M; and (iv) R284M/V147L/N154S/V155M. These constructs typically also encoded an epitope tag at either the N-terminus or C-terminus to facilitate detection. Different epitope tags were tested (FLAG, Myc, CT, HA, V5). Additionally, all constructs contained a Cap 1 5′ Cap (7mG(5′)ppp(5′)NlmpNp), 5′ UTR, 3′ UTR, a poly A tail of 100 nucleotides and were fully modified with 1-methyl-pseudouridine (m1ψ). The ORF amino acid sequences of representative constitutively active human STING constructs without any epitope tag are shown in SEQ ID NOs: 1-10. Exemplary nucleotide sequences encoding these amino acid sequences are shown in SEQ ID NOs: 199-208 and 1442-1450. Exemplary 5′ UTRs for use in the constructs are shown in SEQ ID NOs: 21 and 1323. An exemplary 3′ UTR for use in the constructs is shown in SEQ ID NO: 22. An exemplary 3′ UTR comprising miR-122 and miR-142-3p binding sites for use in the constructs is shown in SEQ ID NO: 23.

[1545] To determine whether constitutively active STING constructs could stimulate IFN-β production, the constructs were transfected into human TF1a cells. Wild-type (non-constitutively active) human and mouse STING constructs were used as negative controls. Twenty-five thousand cells/well were plated in 96 well plates and the mmRNA constructs (250 ng) were transfected into them using Lipofectamine 2000. After 24 and 48 hours, supernatants were harvested and IFN-β levels were determined by standard ELISA. The results are shown in FIG. 1, which demonstrate that the constitutively active STING constructs stimulated IFN-β production, as compared to the wild-type (non-constitutively active) human and mouse STING controls. While all four mutant STING constructs stimulated IFN-β production, the V155M mutant and the R284T mutant showed the highest activity. These results demonstrate the ability of constitutively active STING mRNA constructs to enhance immune responses through stimulation of IFN-β production.

[1546] In a second set of experiments, a reporter gene whose transcription was driven by an interferon-sensitive response element (ISRE) was used to test the ability of a panel of constitutively active STING mRNA constructs to activate the ISRE in a STING KO reporter mouse cell line derived from B16 melanocytes. The results are shown in FIG. 2, which demonstrates that the constitutively active STING constructs stimulated reporter gene expression, thereby indicating that the constructs were capable of activating the interferon-sensitive response element (ISRE).

### Example 2: IRF3 and IRF7 Immune Potentiator mRNA Constructs

[1547] In this example, a series of mmRNA constructs that encoded constitutively activated forms of IRF3 or IRF7 were made and tested for their ability to activate an interferon-sensitive response element (ISRE). The ORF amino acid sequences of representative constitutively active mouse and human IRF3 constructs, comprising a S396D point mutation, without any epitope tag are shown in SEQ ID NOs: 11-12. Exemplary nucleotide sequences encoding these amino acid sequences are shown in SEQ ID NOs: 210-211. The ORF amino acid sequence of a wild-type human IRF7 construct without any epitope tag is shown in SEQ ID NO: 13 (encoded by the nucleotide sequence shown in SEQ ID NO: 212). The ORF amino acid sequences of representative constitutively active human IRF7 constructs without any epitope tag are shown in SEQ ID NOs: 14-18. Exemplary nucleotide sequences encoding these amino acid sequences are shown in SEQ ID NOs: 213-217 and 142-1459. The ORF amino acid sequences of representative truncated human IRF7 constructs (inactive “null” mutations) without any epitope tag are shown in SEQ ID NOs: 19-20. Exemplary nucleotide sequences encoding these amino acid sequences are shown in SEQ ID NOs: 218-219. These constructs typically also encoded an epitope tag at either the N-terminus or C-terminus to facilitate detection. Different epitope tags were tested (FLAG, Myc, CT, HA, V5). Additionally, all constructs contained a Cap 1 5′ Cap (7mG(5′)ppp(5′)NlmpNp), 5′ UTR, 3′ UTR, a poly A tail of 100 nucleotides and were fully modified with 1-methyl-pseudouridine (m1ψ). Exemplary 5′ UTRs for use in the constructs are shown in SEQ ID NOs: 21 and 1323. An exemplary 3′ UTR for use in the constructs is shown in SEQ ID NO: 22. An exemplary 3′ UTR comprising miR-122 and miR-142-3p binding sites for use in the constructs is shown in SEQ ID NO: 23.

[1548] The reporter cell line used in Example 1, whose transcription was driven by an interferon-sensitive response element (ISRE), was used to test the ability of constitutively active IRF3 and IRF7 mRNA constructs to activate the ISRE. The results are shown in FIG. 3A-3B, which demonstrate that the constitutively active IRF3 constructs (FIG. 3A) and the constitutively active IRF7 constructs (FIG. 3B) stimulated reporter gene expression, thereby indicating that the constructs were capable of activating the interferon-sensitive response element (ISRE).

### Example 3: IKKβ, cFLIP and RIPK1 Immune Potentiator mRNA Constructs

[1549] In this example, a luciferase reporter gene whose transcription was driven by the NFκB signaling pathway was used to test the ability of constitutively active IKK, cFLIP and RIPK1 mRNA constructs to activate NFκB signaling.

[1550] Constitutively active IKKβ construct comprised the following two point mutations: S177E/S181E. Constitutively active IKKα or IKKβ constructs comprised PEST mutations. The ORF amino acid sequences of constitutively active IKKβ constructs without any epitope tag are shown in SEQ ID NOs: 146-149. Exemplary nucleotide sequences encoding the protein of SEQ ID NO: 146 are shown in SEQ ID NOs: 1414 and 1485. The ORF amino acid sequences of constitutively active IKKα or IKKβ constructs comprising a PEST mutation, without any epitope tag, are shown in SEQ ID NOs: 150, 152, 154 and 156 (encoded by the nucleotide sequences shown in SEQ ID NOs: 151, 153, 155 and 157, respectively, or SEQ ID NO NOs. 1428, 1397, 1429 and 1430, respectively). Constitutively active cFLIP constructs comprised cFLIP-L, cFLIP-S (aa 1-227), cFLIP p22 (aa 1-198), cFLIP p43 (aa 1-376) or cFLIP p12 (aa 377-480). The ORF amino acid sequences of the cFLIP constructs without any epitope tag are shown in SEQ ID NOs: 141-145. Exemplary nucleotide sequences encoding these cFLIP proteins are shown in SEQ ID NOs: 1398-1402 and 1469-1473. Structures of various constitutively active RIPK1 constructs are described further in, for example, Yatim, N. et al. (2015) Science 350:328-334 or Orozco, S. et al. (2014) Cell Death Differ. 21:1511-1521. The ORF amino acid sequences of the constitutively active RIPK1 constructs without any epitope tag are shown in SEQ ID NOs: 158-163. Exemplary nucleotide sequences encoding these RIPK1 proteins are shown in SEQ ID NOs: 1403-1408 and 1474-1479. In addition to the open reading frame, all constructs contained a Cap 1 5′ Cap (7mG(5′)ppp(5′)NlmpNp), 5′ UTR, 3′ UTR, a poly A tail of 100 nucleotides and were fully modified with 1-methyl-pseudouridine (m1ψ). Exemplary 5′ UTRs for use in the constructs are shown in SEQ ID NOs: 21 and 1323. An exemplary 3′ UTR for use in the constructs is shown in SEQ ID NO: 22. An exemplary 3′ UTR comprising miR-122 and miR-142-3p binding sites for use in the constructs is shown in SEQ ID NO: 23.

[1551] In a first series of experiments, either the cFLIP or IKKβ constructs (12.5 ng RNA) were transfected into B16F10, MC38 or HEK293 cells, together with the NFκB-luc reporter gene and the Dual Luc Assay was performed 24 hours post-transfection as an indicator of activation of NFκB signaling. The results are shown in FIG. 4, which demonstrates that the constitutively active cFLIP and IKKβ constructs stimulated reporter gene expression, thereby indicating that the constructs were capable of activating the NFκB signaling pathway. In a second series of experiments, the RIPK1 constructs were transfected into B16F10 cells, together with the NFκB-luc reporter gene and the Dual Luc Assay was performed 24 hours post-transfection as an indicator of activation of NFκB signaling. The results are shown in FIG. 5, which demonstrates that the constitutively active RIPK1 constructs stimulated reporter gene expression, thereby indicating that the constructs were capable of activating the NFκB signaling pathway.

### Example 4: DIABLO Immune Potentiator mRNA Constructs

[1552] In this example, a series of mmRNA constructs that encoded DIABLO were made and tested for their ability to induce cytokine production. These constructs typically also encoded an epitope tag at either the N-terminus or C-terminus to facilitate detection. Different epitope tags were tested (FLAG, Myc, CT, HA, V5). Additionally, all constructs contained a Cap 1 5′ Cap (7mG(5′)ppp(5′)NlmpNp), 5′ UTR, 3′ UTR, a poly A tail of 100 nucleotides and were fully modified with 1-methyl-pseudouridine (m1ψ). The ORF amino acid sequences of the DIABLO constructs without any epitope tag are shown in SEQ ID NOs: 165-172. Exemplary nucleotide sequences encoding the DIABLO protein of SEQ ID NO: 169 is shown in SEQ ID NOs: 1416 and 1487. Exemplary 5′ UTRs for use in the constructs are shown in SEQ ID NOs: 21 and 1323. An exemplary 3′ UTR for use in the constructs is shown in SEQ ID NO: 22. An exemplary 3′ UTR comprising miR-122 and miR-142-3p binding sites for use in the constructs is shown in SEQ ID NO: 23.

[1553] To determine whether the DIABLO constructs could induce cytokine production, the constructs were transfected into SKOV3 cells. Ten thousand cells/well were plated in 96 well plates and the mmRNA constructs were transfected into them using Lipofectamine 2000. Stimulation of cytokine production by the DIABLO mmRNA constructs in the SKOV3 cells was measured. The results, shown in FIG. 6 for TNF-α and in FIG. 7 for interleukin 6 (IL-6), demonstrate that a number of the DIABLO mmRNA constructs stimulate production of cytokines by the SKOV3 cells.

### Example 5: Immune Potentiator mRNAs Enhance HPV Vaccine Responses

[1554] In this example, the potency and durability of responses to a human papillomavirus (HPV) E6/E7 mRNA-based vaccine used in combination with STING, IRF3 or IRF7 immune potentiators were examined. A specific immune response to human papillomavirus (HPV) in the cervical microenvironment is known to play a key role in eradicating infection and eliminating mutated cells. However, high-risk HPVs are known to modulate immune cells to create an immunosuppressive microenvironment (see e.g., Prata, T. T. et al. (2015) Immunology 146:113-121). Thus, an HPV vaccination approach that leads to a robust and durable immune response is highly desirable.

[1555] The HPV vaccines used in this example were mRNA constructs encoding either intracellular or soluble forms of HPV 16 antigens E6 and E7, referred to herein as iE6/E7 and sE6/E7, respectively. To create the soluble format, a signal peptide required for secretion was fused to the N-terminal of the antigen. The sequence of the signal peptide was derived from the Ig kappa chain V-III region HAH. Mice were immunized intramuscularly with either the iE6/E7 or sE6/E7 mRNA vaccine (at a dose of 0.25 mg/kg) on days 0 and 14, in combination with either a control mRNA construct (NTFIX), or a STING, IRF3 or IRF7 immune potentiator mRNA construct (at a dose of 0.25 mg/kg). The constitutively active STING immune potentiator contained a V155M mutation (mouse version corresponding to SEQ ID NO: 1). The constitutively active IRF3 immune potentiator contained a S396D mutation (corresponding to SEQ ID NO: 12). The constitutively active IRF7 immune potentiator contained an internal deletion and six point mutations (mouse version corresponding to SEQ ID NO: 18). The HPV vaccine construct and the immune potentiator construct were coformulated in MC3 lipid nanoparticles.

[1556] At day 21 and 53, spleen cells and peripheral blood mononuclear cells (PBMC) from mice in each test group were restimulated ex vivo for 4 hours at 37 degrees C. in the presence of GolgiPlug™ (containing Brefeldin A; BD Biosciences) with either: an E6 peptide pool (containing 37 E6 peptides, the sequences of which are shown in SEQ ID NOs: 36-72), an E7 peptide pool (containing 22 E7 peptides, the sequences of which are shown in SEQ ID NOs: 73-94), E6 single peptides (8 individual peptides), E7 single peptides (7 individual peptides) or no peptides (control). Each peptide was provided at a dose of 0.2 μg/ml. CD8 vaccine responses were assessed by intracellular staining (ICS) for IFN-γ or TNF-α.

[1557] Representative ICS results for E7-specific responses by day 21 spleen cells for IFN-γ and TNF-α are shown in FIG. 8A (IFN-γ) and FIG. 8B (TNF-α). Representative ICS results for E6-specific responses by day 21 spleen cells for IFN-γ and TNF-α are shown in FIG. 9A (IFN-γ) and FIG. 9B (TNF-α). The results in FIGS. 8A-8B and 9A-9B demonstrate that CD8 vaccine responses (to both the intracellular and soluble antigen format) were greatly enhanced when the STING, IRF3 or IRF7 immune potentiators were co-formulated with the vaccine, with the E7 epitope being stronger and less variable than the E6 epitope and with the soluble form of antigen being stronger than the intracellular form of antigen. This enhanced CD8 vaccine responses by the immune potentiators was shown to be durable, as evidenced by the representative day 21 versus day 53 E7-specific spleen cell IFN-γ ICS data shown in FIGS. 10A and 10B, respectively. Similar results to the spleen cell data were observed for the PBMC experiments (data not shown). The ability of STING to improve the durability of antigen-specific CD8 responses is further demonstrated by the IFN-γ ICS data shown in FIG. 11A (E7-specific responses from mice immunized with intracellular E6/E7) and FIG. 11B (E7-specific responses from mice immunized with soluble E6/E7), in which over the course of the 7 week experiment it was demonstrated that a higher percentage of antigen-specific CD8 T cells were maintained in the STING-treated mice.

[1558] The percentage of CD8b⁺ cells among the live CD45⁺ cells was also examined. The results for day 21 versus day 53 spleen cells are shown in FIGS. 12A and 12B, respectively. The results demonstrate that the immune potentiators (in particular the STING construct) expand the total CD8b⁺ population on day 21 but not day 53.

[1559] The ability of the immune potentiator constructs to enhance the CD8 vaccine response was further confirmed by E7-MHC1-tetramer staining. Representative results for day 21 versus day 53 spleen cells are shown in FIGS. 13A and 13B, respectively. The E7-MHC-1-tetramer staining results were consistent with the ICS results discussed above, although they were more variable. As demonstrated in FIGS. 14A-14D, the majority of the tetramer positive CD8 cells were found to have an “effector memory” CD62L^{lo} phenotype. Comparison of day 21 versus day 53 E7-tetramer⁺ CD8 cells demonstrated that this “effector-memory” CD62L^{lo} phenotype was maintained throughout the study. Additional staining experiments demonstrated that the immune potentiators slightly reduced the % of total Foxp3⁺ Treg CD4 T cells (data not shown) and did not change the % of CD138⁺ plasmablasts (data not shown).

### Example 6: Immune Potentiator mRNAs Enhance MC38 Cancer Vaccine Responses

[1560] In this example, the potency and durability of responses to an MC38 mRNA-based cancer vaccine used in combination with STING, IRF3 or IRF7 immune potentiator mRNA constructs were examined. The MC38 murine tumor model has been used to identify immunogenic mutant peptides containing neoepitopes capable of stimulating anti-tumor T cell responses (see e.g., Yadav, M. et al. (2014) Nature 515:572-576). Thus, a cancer vaccination approach that leads to a robust and durable immune response against tumor neoepitopes is highly desirable.

[1561] The MC38 vaccine used in this example was an mRNA construct encoding an ADR concatemer of three 25mer mutant peptides containing tumor neoepitopes derived from Adpgk, Dpagt1, and Reps1 (this vaccine is also referred to herein as ADRvax). The mRNA construct encodes the open reading frame shown in SEQ ID NO: 179, which also includes an N-terminal His-tag for easy detection. Mice were immunized intramuscularly with the ADRvax mRNA vaccine (at a dose of 0.25 mg/kg) on days 0 and 14, in combination with either a control mRNA construct (NTFIX), or a STING, IRF3 or IRF7 immune potentiator mRNA construct (at a dose of 0.25 mg/kg). The constitutively active STING immune potentiator contained a V155M mutation (mouse version corresponding to SEQ ID NO: 1). The constitutively active IRF3 immune potentiator contained a S396D mutation (corresponding to SEQ ID NO: 12). The constitutively active IRF7 immune potentiator contained an internal deletion and six point mutations (mouse version corresponding to SEQ ID NO: 18). The MC38 vaccine construct and the immune potentiator construct were coformulated in MC3 lipid nanoparticles.

[1562] At day 21 and 35, CD8⁺ spleen cells from mice in each test group were restimulated ex vivo for 4 hours at 37 degrees C. in the presence of GolgiPlug™ (containing Brefeldin A; BD Biosciences) with either wild-type or mutant MC38 ADR peptides (1 μg/ml per peptide) and CD8 vaccine responses were assessed by intracellular staining (ICS) for IFN-γ. Representative ICS results for MC38 ADR-specific responses by day 21 and day 35 CD8⁺spleen cells for IFN-γ are shown in FIG. 15A (day 21) and FIG. 15B (day 35). Similar results were observed for ICS for TNF-α and for CD8⁺PBMCs. The results demonstrate that CD8 vaccine responses were greatly enhanced by the STING immune potentiator construct, and moderately enhanced by the IRF3 and IRF7 immune potentiator constructs. An initial improvement in the antigen-specific CD8 response for mice treated with immune potentiators was observed at day 21 (approximately 5% versus 1% for STING treatment vs. control), which continued to improve by day 35 (up to 15% for STING treatment compared to control), thereby demonstrating the durability of the response.

[1563] The percentage of CD8b⁺ cells among the live CD45⁺ cells was also examined. The results for day 35 spleen cells and PBMCs are shown in FIG. 16A, which demonstrates that the immune potentiator constructs expand the total CD8b⁺ population. As demonstrated in FIG. 16B, the majority of the CD8⁺ spleen cells and PBMCs were found to have an “effector memory” CD62L^{lo} phenotype. Additional staining experiments demonstrated that the STING and IRF7 immune potentiator construct slightly reduced the % of total Foxp3⁺ Treg CD4 T cells (data not shown). Additional staining experiments demonstrated that the immune potentiators did not change the % of CD138⁺ plasmablasts (data not shown).

### Example 7: Immune Potentiator mRNAs Enhance Bacterial Vaccine Responses

[1564] In this example, the potency of responses to a bacterial mRNA-based vaccine used in combination with a STING immune potentiator was examined, in particular the effect of the immune potentiator on the humoral immune response (antibody production) against the bacterial antigens.

[1565] The bacterial vaccine used in this example was a pool of mRNA constructs encoding a panel of bacterial antigenic peptides that had been established in the art to provide protective immunity against bacterial infection. Thus, the vaccine used in this example was a multivalent mRNA-based bacterial vaccine. The bacterial peptide antigen mRNA constructs encoded the ORF for the peptide antigens and also contained a Cap 1 5′ Cap (7mG(5′)ppp(5′)NlmpNp), 5′ UTR, 3′ UTR, a poly A tail of 100 nucleotides and were fully modified with 1-methyl-pseudouridine (m1ψ). Exemplary 5′ UTRs for use in the constructs are shown in SEQ ID NOs: 21 and 1323. An exemplary 3′ UTR for use in the constructs is shown in SEQ ID NO: 22. An exemplary 3′ UTR comprising miR-122 and miR-142-3p binding sites for use in the constructs is shown in SEQ ID NO: 23. These constructs optionally also can encode an epitope tag at either the N-terminus or C-terminus to facilitate detection. Different epitope tags were tested (FLAG, Myc, CT, HA, V5).

[1566] The bacterial peptide antigen mRNA constructs were administered to mice at a dose of 0.2 μg or 0.8 μg per antigen on day 0, 14 and 28, either alone or in combination with a STING immune potentiator mRNA construct. The constitutively active STING immune potentiator contained a V155M mutation (mouse version corresponding to SEQ ID NO: 1). Serum was harvested pre-treatment and at days 14, 28 and 35. Antibody titers were compared between the mice treated with the bacterial peptide antigen mRNA constructs alone versus those treated with the bacterial peptide antigen mRNA constructs in combination with a STING mRNA construct. Mice treated with the higher dose (0.8 μg) of the bacterial antigen peptide mRNA constructs showed a modest effect on antigen-specific antibody titers by co-treatment with the STING construct (data not shown). However, as shown in FIG. 17, co-treatment with the STING construct showed a significant effect on antigen-specific antibody titers in mice treated with the lower dose (0.2 μg) of the bacterial peptide antigen mRNA constructs (referred to as RNAs 0298, 2753, 2723, 2635, 1507, 0992 and 0735 in FIG. 17). These results demonstrate that the STING immune potentiator enhanced the humoral immune response against the bacterial peptide antigens encoded by the bacterial mRNA vaccine constructs, particularly when the bacterial mRNA vaccine construct was used at lower doses.

### Example 8: KRAS-STING mRNA Constructs

[1567] A comprehensive survey of Ras mutations in various cancer types has been reported (Prior, I. A. et al. (2012) Cancer Res. 72:2457-2467). This survey demonstrated that the top three most frequent mutations of KRAS in colorectal cancer are G12D, G12V and G13D. A series of mutant KRAS mRNA constructs were prepared that encoded one or more KRAS peptides containing one of these three mutations, for use as KRAS anti-tumor mRNA-based vaccines. Furthermore, to examine the effect of mRNA-based immune potentiators on KRAS vaccine responses, a series of mRNA constructs were prepared that encoded one or more mutant KRAS peptides linked at the N-terminus or the C-terminus to sequence encoding STING as an immune potentiator. Thus, in these KRAS-STING mRNA constructs, the vaccine antigen(s) and the immune potentiator are encoded by the same mRNA construct.

[1568] Mutant KRAS peptide mRNA constructs were prepared that encoded: a 15mer peptide having the G12D, G12V or the G13D mutation (the amino acid sequence of which is shown in SEQ ID NOs: 95-97, respectively); a 25mer peptide having the G12D, G12V or the G13D mutation (SEQ ID NOs: 98-100, respectively); three copies of the 15mer peptide having the G12D, G12V or the G13D mutation (SEQ ID NOs: 101-103, respectively); or three copies of the 25mer peptide having the G12D, G12V or the G13D mutation (SEQ ID NOs: 104-106, respectively). Additional constructs encoded one copy or three copies of a 25mer peptide having a G12C mutation (SEQ ID NOs: 131-132, respectively) or a wild-type 25mer peptide (SEQ ID NO: 133). In certain embodiments, a G12C KRAS mutation may be used in combination with a G12D, G12V or G13D mutation, or combinations thereof. Nucleotide sequences encoding these mutant KRAS peptides are provided in Example 9.

[1569] Mutant KRAS peptide-STING mRNA constructs, having the STING coding sequence at the N-terminus, were prepared that encoded: a 15mer peptide having the G12D, G12V or the G13D mutation (the amino acid sequence of which is shown in SEQ ID NOs: 107-109, respectively); a 25mer peptide having the G12D, G12V or the G13D mutation (SEQ ID NOs: 110-112, respectively); three copies of the 15mer peptide having the G12D, G12V or the G13D mutation (SEQ ID NOs: 113-115, respectively); or three copies of the 25mer peptide having the G12D, G12V or the G13D mutation (SEQ ID NOs: 116-118, respectively). In certain embodiments, a G12C KRAS mutation may be used in combination with a G12D, G12V or G13D mutation, or combinations thereof. Representative nucleotide sequences encoding these KRAS peptide-STING constructs having the STING coding sequence at the N-terminus are shown in SEQ ID NOs: 220 and 222.

[1570] Mutant KRAS peptide-STING mRNA constructs, having the STING coding sequence at the C-terminus, were prepared that encoded: a 15mer peptide having the G12D, G12V or the G13D mutation (the amino acid sequence of which is shown in SEQ ID NOs: 119-121, respectively); a 25mer peptide having the G12D, G12V or the G13D mutation (SEQ ID NOs: 122-124, respectively); three copies of the 15mer peptide having the G12D, G12V or the G13D mutation (SEQ ID NOs: 125-127, respectively); or three copies of the 25mer peptide having the G12D, G12V or the G13D mutation (SEQ ID NOs: 128-130, respectively). In certain embodiments, a G12C KRAS mutation may be used in combination with a G12D, G12V or G13D mutation, or combinations thereof. Representative nucleotide sequences encoding these KRAS peptide-STING constructs having the STING coding sequence at the C-terminus are shown in SEQ ID NOs: 221 and 223.

[1571] These constructs can also encode an epitope tag at either the N-terminus or C-terminus to facilitate detection. Different epitope tags can be used (e.g., FLAG, Myc, CT, HA, V5). Additionally, all constructs contained a Cap 1 5′ Cap (7mG(5′)ppp(5′)NlmpNp), 5′ UTR, 3′ UTR, a poly A tail and were fully modified with 1-methyl-pseudouridine (m1ψ). Exemplary 5′ UTRs for use in the constructs are shown in SEQ ID NOs: 21 and 1323. An exemplary 3′ UTR for use in the constructs is shown in SEQ ID NO: 22. An exemplary 3′ UTR comprising miR-122 and miR-142-3p binding sites for use in the constructs is shown in SEQ ID NO: 23.

[1572] To test vaccine responses in mice treated either with a KRAS mutant peptide(s) mRNA vaccine construct or with a KRAS mutant peptide(s) vaccine-STING immune potentiator mRNA construct, mice (HLA-A*11:01 or HLA-A*2:01; Taconic) are treated with a KRAS mutant peptide vaccine mRNA construct (e.g., encoding one of SEQ ID NOs: 95-106) or with a KRAS mutant peptide vaccine-STING immune potentiator mRNA construct (e.g., encoding one of SEQ ID NOs: 107-130). Mice are immunized intramuscularly on day 1 and day 15 (0.5 mg/kg) and sacrificed at day 22. To test CD8 vaccine responses, CD8⁺ spleen cells and PBMCs are restimulated ex vivo for 4 hours at 37 degrees C. in the presence of GolgiPlug™ (containing Brefeldin A; BD Biosciences) with either mutant KRAS peptides (G12D, G12V or G13D) or with wild type KRAS peptide (1 μg/ml per peptide). CD8 vaccine responses can then be assessed by intracellular staining (ICS) for IFN-γ and/or TNF-α. Enhanced ICS responses for IFN-γ and/or TNF-α in mice treated with the KRAS mutant peptide vaccine-STING immune potentiator mRNA construct, as compared to treatment with the KRAS mutant peptide vaccine mRNA construct, indicates that the STING immune potentiator enhances KRAS-specific CD8 vaccine responses.

### Example 9: Use of Immune Potentiator mRNA Construct in Combination with Activating Oncogene KRAS Mutant Peptide mRNA Constructs

[1573] In this example, mutant KRAS peptide mRNA constructs are used in combination with a separate constitutively active STING immune potentiator mRNA construct to enhance immune responses to the mutant KRAS peptides.

[1574] KRAS is the most frequently mutated oncogene in human cancer (˜15%). KRAS mutations occur mostly in a couple of“hotspots” and activate the oncogene. Prior research has shown limited ability to raise T cells specific to the oncogenic mutation. However, much of this was done in the context of the most common HLA allele (A2, which occurs in ˜50% of Caucasians). More recently, it has been demonstrated that (a) specific T cells can be generated against point mutations in the context of less common HLA alleles (A11, C8), and (b) growing these cells ex-vivo and transferring them back to the patient has mediated a dramatic tumor response in a patient with lung cancer. (N Engl J Med 2016; 375:2255-2262 Dec. 8, 2016 DOI: 10.1056/NEJMoa1609279).

[1575] As shown in Table 5 below, in CRC (colorectal cancer), only 3 mutations (G12V, G12D, and G13D) account for 96% of KRAS mutations in this malignancy. Furthermore, all CRC patients get typed for KRAS mutations as standard of care.

TABLE 5
COSMIC* case counts

| | All cancers | % | CRC | % |
|---|---|---|---|---|
| G12S | 1849 | 1% | | |
| G12V | 9213 | 4% | 5215 | 29% |
| G12C | 435 | 2% | | |
| G12D | 13634 | 7% | 8083 | 44% |
| G12A | 2179 | 1% | | |
| G12R | 1244 | 1% | | |
| G13D | 5084 | 2% | 4267 | 23% |
| | | 18% | | 96% |
| Tested | 208629 | | 18271 | |

*http://cancer.sanger.ac.uk/cosmic/gene/analysis?In=KRAS

[1576] In another COSMIC data set, 73.68% of KRAS mutations in colorectal cancer are accounted for by these 3 mutations (G12V, G12D, and G13D) (Table 6).

TABLE 6

| | colon | % | rectal | % | total | % |
|---|---|---|---|---|---|---|
| 12D | 635 | 35.04 | 178 | 33.46 | 813 | 34.68 |
| 12V | 364 | 20.09 | 124 | 23.31 | 488 | 20.82 |
| 13D | 338 | 18.65 | 88 | 16.54 | 426 | 18.17 |
| | | | | | | 73.68 |

[1577] Prior et al. investigated and summarized isoform-specific point mutation specificity for HRAS, KRAS, and NRAS, respectively (Prior et al. Cancer Res. 2012 May 15; 72(10): 2457-2467). Data representing total number of tumors with each point mutation were collated from COSMIC v52 release. The most frequent mutations for each isoform for each cancer type are reported (see Table 2 of Prior et al.).

[1578] In addition, secondary KRAS mutations have been identified in EGFR blockade resistant patients. RAS is downstream of EGFR and it has been found to constitute a mechanism of resistance to EGFR blockade therapies. EGFR blockade resistant KRAS mutant tumors can be targeted using compositions and methods disclosed herein. In a few cases, more than one KRAS mutation was identified in the same patient (up to four different mutations co-occur). Diaz et al. reports these secondary KRAS mutations after acquisition of EGFR blockade (see Supplementary Table 2), and Misale et al. reports secondary KRAS mutations after EGFR blockade (see FIG. 3b) (Diaz et al. The molecular evolution of acquired resistance to targeted EGFR blockade in colorectal cancers, Nature 486:537 (2012); Misale et al. Emergence of KRAS mutations and acquired resistance to anti-EGFR therapy in colorectal cancer, Nature 486:532 (2012)). This mutational spectrum appears to be at least somewhat different than primary tumor missense mutants in colorectal cancer.

[1579] As shown in FIG. 18, NRAS is also mutated in colorectal cancer, but at a lower frequency than KRAS, based on analysis of data available in cBioPortal.

[1580] In this example, animals are administered an immunomodulatory therapeutic composition that includes an mRNA encoding at least one activating oncogene mutation peptide, e.g., at least one activating KRAS mutation, alone or in combination with an immune potentiator mRNA construct, e.g. a constitutively active STING mRNA construct, e.g., encoding a sequence as shown in any of SEQ ID NOs: 1-10, such as for example a mRNA construct encoding a constitutively active human STING protein comprising a V155M mutation, having the amino acid sequence shown in SEQ ID NO: 1 and encoded the nucleotide sequence shown in SEQ ID NO: 199.

[1581] Exemplary KRAS mutant peptide sequences and mRNA constructs are shown in Tables 7-9.

TABLE 7
KRAS mutant peptide sequences

| | 9 AA | | |
|---|---|---|---|
| | sequence | 15 mer | 25 mer |
| G12D | VVGADGVGK | MKLVVVGADGVGKSAL | MTEYKLVVVGADGVGKSALTIQLIQ |
| | (SEQ ID NO: 180) | (SEQ ID NO: 95) | (SEQ ID NO: 98) |
| G12V | VVGAVGVGK | MKLVVVGAVGVGKSAL | MTEYKLVVVGAVGVGKSALTIQLIQ |
| | (SEQ ID NO: 181) | (SEQ ID NO: 96) | (SEQ ID NO: 99) |
| G13D | VGAGDVGKS | MLVVVGAGDVGKSALT | MTEYKLVVVGAGDVGKSALTIQLIQ |
| | (SEQ ID NO: 182) | (SEQ ID NO: 97) | (SEQ ID NO: 100) |
| G12C | VVGACGVGK | MKLVVVGACGVGKSA | MTEYKLVVVGACGVGKSALTIQLIQ |
| | (SEQ ID NO: 183) | (SEQ ID NO: 184) | (SEQ ID NO: 131) |
| WT | | | MTEYKLVVVGAGGVGKSALTIQLIQ |
| | | | (SEQ ID NO: 133) |

TABLE 8
KRAS mutant amino acid sequences

| KRAS MUTANT | AMINO ACID SEQUENCE |
|---|---|
| KRAS(G12D)15 mer | MKLVVVGADGVGKSAL (SEQ ID NO: 95) |
| KRAS(G12V)15 mer | MKLVVVGAVGVGKSAL (SEQ ID NO: 96) |
| KRAS(G13D)15 mer | MLVVVGAGDVGKSALT (SEQ ID NO: 97) |
| KRAS(G12D)25 mer | MTEYKLVVVGADGVGKSALTIQLIQ (SEQ ID NO: 98) |
| KRAS(G12V)25 mer | MTEYKLVVVGAVGVGKSALTIQLIQ (SEQ ID NO: 99) |
| KRAS(G13D)25 mer | MTEYKLVVVGAGDVGKSALTIQLIQ (SEQ ID NO: 100) |
| KRAS(G12D)15 mer\hat{ }3 | MKLVVVGADGVGKSALKLVVVGADGVGKSALKLVVVGADGVG |
| | KSAL (SEQ ID NO: 101) |
| KRAS(G12V)15 mer\hat{ }3 | MKLVVVGAVGVGKSALKLVVVGAVGVGKSALKLVVVGAVGVG |
| | KSAL (SEQ ID NO: 102) |
| KRAS(G13D)15 mer\hat{ }3 | MLVVVGAGDVGKSALTLVVVGAGDVGKSALTLVVVGAGDVGK |
| | SALT (SEQ ID NO: 103) |
| KRAS(G12D)25 mer\hat{ }3 | MTEYKLVVVGADGVGKSALTIQLIQMTEYKLVVVGADGVGKSA |
| | LTIQLIQMTEYKLVVVGADGVGKSALTIQLIQ (SEQ ID NO: 104) |
| KRAS(G12V)25 mer\hat{ }3 | MTEYKLVVVGAVGVGKSALTIQLIQMTEYKLVVVGAVGVGKSA |
| | LTIQLIQMTEYKLVVVGAVGVGKSALTIQLIQ (SEQ ID NO: 105) |
| KRAS(G13D)25 mer\hat{ }3 | MTEYKLVVVGAGDVGKSALTIQLIQMTEYKLVVVGAGDVGKSA |
| | LTIQLIQMTEYKLVVVGAGDVGKSALTIQLIQ (SEQ ID NO: 106) |
| KRAS(G12C)25 mer | MTEYKLVVVGACGVGKSALTIQLIQ (SEQ ID NO: 131) |
| KRAS(G12C)25 mer\hat{ }3 | MTEYKLVVVGACGVGKSALTIQLIQMTEYKLVVVGACGVGKSA |
| | LTIQLIQMTEYKLVVVGACGVGKSALTIQLIQ (SEQ ID NO: 132) |
| KRAS(WT)25 mer | MTEYKLVVVGAGGVGKSALTIQLIQ (SEQ ID NO: 133) |

TABLE 9
KRAS mutant antigen mRNA sequences

| mRNA | Orf Sequence (Amino | |
|---|---|---|
| Name | Acid) | Orf Sequence (Nucleotide) |
| KRAS | MTEYKLVVVGADG | ATGACCGAGTACAAGCTGGTGGTGGTGGGCGCCG |
| (G12D) | VGKSALTIQLIQ | ACGGCGTGGGCAAGAGCGCCCTGACCATCCAGCT |
| 25 mer | (SEQ ID NO: 98) | GATCCAG (SEQ ID NO: 185) |
| KRAS | MTEYKLVVVGAVG | ATGACCGAGTACAAGCTGGTGGTGGTGGGCGCCG |
| (G12V) | VGKSALTIQLIQ | TGGGCGTGGGCAAGAGCGCCCTGACCATCCAGCT |
| 25 mer | (SEQ ID NO: 99) | GATCCAG (SEQ ID NO: 186) |
| KRAS | MTEYKLVVVGAGD | ATGACCGAGTACAAGCTGGTGGTGGTGGGCGCCG |
| (G13D) | VGKSALTIQLIQ | GCGACGTGGGCAAGAGCGCCCTGACCATCCAGCT |
| 25 mer | (SEQ ID NO: 100) | GATCCAG (SEQ ID NO: 187) |
| KRAS | MTEYKLVVVGADG | ATGACCGAGTACAAGTTAGTGGTTGTGGGCGCCG |
| (G12D) | VGKSALTIQLIQMTE | ACGGCGTGGGCAAGAGCGCCCTCACCATCCAGCT |
| 25 mer\hat{ }3 | YKLVVVGADGVGK | TATCCAGATGACGGAATATAAGTTAGTAGTAGTG |
| | SALTIQLIQMTEYKL | GGAGCCGACGGTGTCGGCAAGTCCGCTTTGACCA |
| | VVVGADGVGKSAL | TTCAACTTATTCAGATGACAGAGTATAAGCTGGTC |
| | TIQLIQ (SEQ ID NO: | GTTGTAGGCGCAGACGGCGTTGGAAAGTCGGCAC |
| | 104) | TGACGATCCAGTTGATCCAG (SEQ ID NO: 188) |
| KRAS | MTEYKLVVVGAVG | ATGACCGAGTACAAGCTCGTCGTGGTGGGCGCCG |
| (G12V) | VGKSALTIQLIQMTE | TGGGCGTGGGCAAGAGCGCCCTAACCATCCAGTT |
| 25 mer\hat{ }3 | YKLVVVGAVGVGK | GATCCAGATGACCGAATATAAGCTCGTGGTAGTC |
| | SALTIQLIQMTEYKL | GGAGCGGTGGGCGTTGGCAAGTCAGCGCTAACAA |
| | VVVGAVGVGKSAL | TACAACTAATCCAAATGACCGAATACAAGCTAGT |
| | TIQLIQ (SEQ ID NO: | TGTAGTCGGTGCCGTCGGCGTTGGAAAGTCAGCC |
| | 105) | CTTACAATTCAGCTCATTCAG (SEQ ID NO: 189) |
| KRAS | MTEYKLVVVGAGD | ATGACCGAGTACAAGCTCGTAGTGGTTGGCGCCG |
| (G13D) | VGKSALTIQLIQMTE | GCGACGTGGGCAAGAGCGCCCTAACCATCCAGCT |
| 25 mer\hat{ }3 | YKLVVVGAGDVGK | CATCCAGATGACAGAATATAAGCTTGTGGTTGTG |
| | SALTIQLIQMTEYKL | GGAGCAGGAGACGTGGGAAAGAGTGCGTTGACG |
| | VVVGAGDVGKSAL | ATTCAACTCATACAGATGACCGAATACAAGTTGG |
| | TIQLIQ (SEQ ID NO: | TGGTGGTCGGCGCAGGTGACGTTGGTAAGTCTGC |
| | 106) | ACTAACTATACAACTGATCCAG (SEQ ID NO: 190) |
| KRAS | MTEYKLVVVGACG | ATGACCGAGTACAAGCTGGTGGTGGTGGGCGCCT |
| (G12C) | VGKSALTIQLIQ | GCGGCGTGGGCAAGAGCGCCCTGACCATCCAGCT |
| 25 mer | (SEQ ID NO: 131) | GATCCAG (SEQ ID NO: 191) |
| KRAS | MTEYKLVVVGACG | ATGACCGAGTACAAGCTCGTGGTTGTTGGCGCCTG |
| (G12C) | VGKSALTIQLIQMTE | CGGCGTGGGCAAGAGCGCCCTCACCATCCAGCTC |
| 25 mer\hat{ }3 | YKLVVVGACGVGK | ATCCAGATGACAGAGTATAAGTTAGTCGTTGTCG |
| | SALTIQLIQMTEYKL | GAGCTTGCGGAGTTGGAAAGTCGGCGCTCACCAT |
| | VVVGACGVGKSAL | TCAACTCATACAAATGACAGAATATAAGTTAGTG |
| | TIQLIQ (SEQ ID NO: | GTGGTGGGTGCGTGTGGCGTTGGCAAGAGTGCGC |
| | 132) | TTACTATCCAGCTCATTCAG (SEQ ID NO: 192) |
| KRAS | MTEYKLVVVGAGG | ATGACCGAGTACAAGCTGGTGGTGGTGGGCGCCG |
| (WT) | VGKSALTIQLIQ | GCGGCGTGGGCAAGAGCGCCCTGACCATCCAGCT |
| 25 mer | (SEQ ID NO: 133) | GATCCAG (SEQ ID NO: 193) |

Chemistry: uridines modified N1-methyl pseudouridine (m1Ψ)
Cap: C1
Tail: T100

5′ UTR Sequence (standard 5′ Flank (includes
Production FP + T7 site + 5′UTR)):
(SEQ ID NO: 21)
TCAAGCTTTTGGACCCTCGTACAGAAGCTAATACGACTCACTATAGGGAA
ATAAGAGAGAAAAGAAGAGTAAGAAGAAATATAAGAGCCACC
5′ UTR Sequence (No Promoter):
(SEQ ID NO: 194)
GGGAAATAAGAGAGAAAAGAAGAGTAAGAAGAAATATAAGAGCCACC
3′ UTR Sequence (Human 3′ UTR no XbaI):
(SEQ ID NO: 22)
TGATAATAGGCTGGAGCCTCGGTGGCCATGCTTCTTGCCCCTTGGGCCTC
CCCCCAGCCCCTCCTCCCCTTCCTGCACCCGTACCCCCGTGGTCTTTGAA
TAAAGTCTGAGTGGGCGGC

[1582] In a first study to examine the effect of a STING immune potentiator mRNA construct on KRAS antigen responses in vivo, HLA-A*2:01 Tg mice (Taconic, strain 9659F, n=4) are administered mRNA encoding mutated KRAS as follows: mRNA encoding mutated KRAS (alone or in combination with STING) administered on day 1, bleed taken on day 8, mRNA encoding mutated KRAS (alone or in combination with STING) administered on day 15, animal sacrificed on day 22. The test groups are shown in Table 10 as follows:

TABLE 10

| TEST | | Test/Control | Immune | | | Dosing |
|---|---|---|---|---|---|---|
| group | Group | Material | Potentiator | Vehicle | Route | Regimen |
| KRAS- | 1 | KRAS G12D | None (NTFIX) | Compound 25 | IM | Day 1, 15 |
| MUT | 2 | KRAS G12V | None (NTFIX) | Compound 25 | IM | Day 1, 15 |
| | 3 | KRAS G13D | None (NTFIX) | Compound 25 | IM | Day 1, 15 |
| KRAS- | 4 | KRAS G12D | STING V155M) | Compound 25 | IM | Day 1, 15 |
| MUT + | 5 | KRAS G12V | STING V155M) | Compound 25 | IM | Day 1, 15 |
| STING | 6 | KRAS G13D | STING V155M) | Compound 25 | IM | Day 1, 15 |
| No Ag | 7 | NTFIX | NTFIX | Compound 25 | IM | Day 1, 15 |
| STING | 8 | NTFIX | STING V155M) | Compound 25 | IM | Day 1, 15 |
| Only | | | | | | |

[1583] mRNA is administered to animals at a dose of 0.5 mg/kg (10 ug per 20-g animal). The KRAS and STING constructs are administered at a 1:1 ratio. Ex vivo restimulation (1 ug/ml per peptide) is tested for 4 hours at 37 degrees Celsius in the presence of GolgiPlug (Brefeldin A). Intracellular cytokine staining (ICS) is tested for KRAS G12D, KRAS G12V, KRAS G13D, KRAS G12WT, KRAS G13WT, and no peptide.

[1584] mRNA encoding KRAS mutations, alone or in combination with mRNA encoding constitutively active STING, is tested for the ability to generate T cells. Efficacy of mRNA encoding KRAS mutations is compared, for example, to peptide vaccination. The effect of the STING immune potentiator is determined by comparing treatment with the KRAS mutant peptides alone versus in combination with the STING immune potentiator. For example, CD8 vaccine responses can be assessed by intracellular staining (ICS) for IFN-γ and/or TNF-α as described herein. Enhanced ICS responses for IFN-γ and/or TNF-α in mice treated with the KRAS mutant peptide vaccine in combination with the STING immune potentiator mRNA construct, as compared to treatment with the KRAS mutant peptide vaccine mRNA construct alone, indicates that the STING immune potentiator enhances KRAS-specific CD8 vaccine responses.

[1585] In a second study to examine the effect of the STING immune potentiator mRNA construct on immune responses to various different forms of the mutant KRAS peptide antigen mRNA constructs, HLA*A*11:01 Tg mice (Taconic, strain 9660F, n=4) are administered mRNA encoding various different forms of mutated KRAS peptide antigen mRNA constructs in combination with a STING immune potentiator mRNA construct as follows: mRNA encoding mutated KRAS in combination with STING administered on day 1, bleed taken on day 8, mRNA encoding mutated KRAS in combination with STING administered on day 15, animal sacrificed on day 22.

[1586] The types of mutated KRAS constructs tested were as follows: (i) mRNA encoding a single mutant KRAS 25mer peptide antigen containing either the G12D, G12V, G13D or G12C mutation (“singlet”); (ii) mRNA encoding a concatemer of three 25mer peptide antigens (thus creating a 75mer), one of each containing the G12D, G12V and G13D mutations (“KRAS-3MUT”); (iii) mRNA encoding a concatemer of four 25mer peptide antigens (thus creating a 100mer), one of each containing the G12D, G12V, G13D and G12C mutations (“KRAS-4MUT”); or (iv) four separate mRNAs coadministered together, each encoding a single mutant KRAS 25mer peptide antigen containing either the G12D, G12V, G13D or G12C mutation (“Single×4”).

[1587] The amino acid and nucleotide sequences of the G12D 25mer are shown in SEQ ID NOs: 98 and 185, respectively. The amino acid and nucleotide sequences of the G12V 25mer are shown in SEQ ID NOs: 99 and 186, respectively. The amino acid and nucleotide sequences of the G13D 25mer are shown in SEQ ID NOs: 100 and 187, respectively. The amino acid and nucleotide sequences of the G12C 25mer are shown in SEQ ID NOs: 131 and 191 respectively. The amino acid and nucleotide sequences of the KRAS-3MUT 75mer are shown in SEQ ID NOs: 195 and 196, respectively. The amino acid and nucleotide sequences of the KRAS-4MUT 100mer are shown in SEQ ID NOs: 197 and 198, respectively. Additional nucleotide sequences of KRAS-4MUT 100mer are shown in SEQ ID NOs: 1321 and 1322.

[1588] The test groups are shown in Table 11 as follows:

TABLE 11

| | | Test/Control | Immune | | | Dosing |
|---|---|---|---|---|---|---|
| TEST group | Group | Material | Potentiator | Vehicle | Route | Regimen |
| KRAS-MUT | 1 | KRAS G12D | STING (V155M) | Compound 25 | IM | Day 1, 15 |
| Singlet | 2 | KRAS G12V | STING (V155M) | Compound 25 | IM | Day 1, 15 |
| | 3 | KRAS G13D | STING (V155M) | Compound 25 | IM | Day 1, 15 |
| | 4 | KRAS G12C | STING (V155M) | Compound 25 | IM | Day 1, 15 |
| KRAS-MUT | 5 | KRAS-3MUT | STING (V155M) | Compound 25 | IM | Day 1, 15 |
| Concatemer | 6 | KRAS-4MUT | STING (V155M) | Compound 25 | IM | Day 1, 15 |
| Single X 4 | 7 | G12D + G12V + | STING (V155M) | Compound 25 | IM | Day 1, 15 |
| | | G12C + G13D | | | | |
| STING Only | 8 | NTFIX | STING (V155M) | Compound 25 | IM | Day 1, 15 |

[1589] mRNA is administered to animals at a dose of 0.5 mg/kg (10 ug per 20-g animal). The KRAS and STING constructs are administered at a 1:1 ratio. Ex vivo restimulation (1 ug/ml per peptide) is tested for 4 hours at 37 degrees Celsius in the presence of GolgiPlug (Brefeldin A). Intracellular cytokine staining (ICS) is tested for KRAS G12D, KRAS G12V, KRAS G13D, G12C, KRAS G12WT, KRAS G13WT, and no peptide.

[1590] The ability of the various mRNAs encoding KRAS mutations in combination with mRNA encoding constitutively active STING to generate T cell responses is tested to allow for comparison of the effect of the STING immune potentiator on the various different KRAS constructs. For example, CD8 vaccine responses can be assessed by intracellular staining (ICS) for IFN-γ and/or TNF-α as described herein.

### Example 10: Prophylactic or Therapeutic Vaccination with HPV Vaccine in Combination with STING Immune Potentiator Inhibits Tumor Growth

[1591] In this example, mice were treated with an HPV vaccine in combination with a STING immune potentiator either prior to, at the same time as, or after challenge with TC1 tumor cells. TC-1 is an HPV16 E7-expressing murine tumor model known in the art (see e.g., Bartkowiak et al. (2015) Proc. Natl. Acad. Sci. USA 112:E5290-5299). The HPV vaccines used in this example were mRNA constructs encoding either intracellular or soluble forms of HPV 16 antigens E6 and E7, referred to herein as iE6/E7 and sE6/E7, respectively, as described in Example 5. The constitutively active STING immune potentiator used in this example contained a V155M mutation, as described in Example 5. The HPV vaccine construct and the immune potentiator construct were coformulated in MC3 lipid nanoparticles. Certain mice were also treated with an immune checkpoint inhibitor (either anti-CTLA-4 or anti-PD-1).

[1592] In a first set of experiments examining the prophylactic activity of the HPV+STING vaccination, C57/B6 mice were treated by intramuscular injection with 0.5 mg/kg of the HPV+STING vaccine (encoding either sE6/E7 or iE6/E7) on either (i) days −7 and −14, or (ii) days 1 and 8, followed by subcutaneous injection of 2×10⁵ TC1 cells on day 1. Certain mice were also treated on days 6, 9 and 12 with either anti-CTLA-4 (clone 9H10) or anti-PD-1 (RMP1-14). Representative results, reported as tumor volume over time, are shown in the graphs of FIG. 19A-19C, wherein FIGS. 19A and 19B show data for mice treated on days −14 and −7 with either sE6/E7 (FIG. 19A) or iE6/E7 (FIG. 19B) and FIG. 19C shows data for mice treated on days 1 and 8 with sE6/E7. The results demonstrate that all of the mice treated with the HPV+STING vaccine (alone or in combination with immune checkpoint inhibitors) showed complete inhibition of tumor growth over several weeks, as compared to the control mice (treated with the control mRNA construct NTFIX, alone or in combination with an immune checkpoint inhibitor). Thus, these experiments demonstrate that prophylactic vaccination (i.e., prior to or at the same time as tumor challenge) with the HPV vaccine together with the STING immune potentiator is effective in preventing growth of HPV-expressing tumor cells in vivo.

[1593] In a second set of experiments examining the therapeutic activity of the HPV+STING vaccination, C57/B6 mice were administered 2×10⁵ TC1 cells subcutaneously on day 1, followed by treatment by intramuscular injection with 0.5 mg/kg of the HPV+STING vaccine (encoding sE6/E7) on days 8 and 15. Certain mice were also treated on days 13, 16 and 19 with either anti-CTLA-4 (clone 9H10) or anti-PD-1 (RMP1-14). Representative results, reported as tumor volume over time, are shown in the graphs of FIGS. 20A-20I. The results demonstrate that the mice treated with the HPV+STING vaccine (alone or in combination with immune checkpoint inhibitors) showed tumor regression (FIGS. 20A-20C), as compared to the control mice treated with the control mRNA construct NTFIX, alone or in combination with an immune checkpoint inhibitor (FIGS. 20D-20F) or the control mice treated with the sE6/E7 construct in combination with the control DMXAA compound (a chemical activator of STING), alone or in combination with an immune checkpoint inhibitor (FIGS. 20G-20I). Thus, these experiments demonstrate that therapeutic vaccination (i.e., subsequent to tumor challenge) with the HPV vaccine together with the STING immune potentiator is effective in inducing regression of HPV-expressing tumors in vivo.

[1594] In a third series of experiments, to examine the efficacy of the HPV-STING therapeutic vaccine in larger TC1 tumors, C57/B6 mice were administered 2×10⁵ TC1 cells subcutaneously and tumors were allowed to grow to a volume of either 200 mm³ or 300 mm³, which was then designated as day 1. Mice were then treated on days 1 and 8 by intramuscular injection with the HPV+STING vaccine (encoding sE6/E7). The treatment groups and corresponding dosages are provided in Table 12.

TABLE 12

| | | | Vax |
|---|---|---|---|
| Tumor size | | Vax dose 1 | dose 2 |
| (mm³) | Group | (day 1), μg | (day 8) μg |
| 200 | PBS | none | none |
| | sE6/7 + NFTIX (1:1) | 10 | 10 |
| | sE6/7 + STING (1:1) | 10 | 5 |
| | sE6/7 + NFTIX (1:1) + 200 μg | 10 | 10 |
| | DMXAA | | |
| 300 | PBS | none | none |
| | sE6/7 + NFTIX (1:1) | 10 | 10 |
| | sE6/7 + STING (1:1) | 10 | None |
| | sE6/7 + NFTIX (1:1) + 200 μg | 10 | 10 |
| | DMXAA | | |

[1595] The results are shown in FIG. 21, which show tumor volume over the course of 22 days (upper graphs are for 200 mm³ tumors and lower graphs are for 300 mm³ tumors). The results demonstrate that the HPV-STING therapeutic vaccine exhibits efficacy in inhibiting larger HPV-expressing tumors in vivo.

### Example 11: Determining Optimal Antigen:Immune Potentiator Mass Ratio in mRNA Vaccine Design

[1596] In this example, studies were performed in animals treated with an antigen of interest (Ag) in combination with an immune potentiator at different Ag:Immune Potentiator ratios, followed by examination of T cell responses to the antigen, to determine optimal Ag:Immune Potentiator ratios in enhancing the immune response to the antigen of interest.

[1597] In a first set of experiments, mice were treated with an MC38 vaccine encoding an ADR concatemer of three 25mer mutant peptides containing tumor neoepitopes derived from Adpgk, Dpagt1, and Reps1 (this vaccine is also referred to herein as ADRvax), as described in Example 6, in combination with a constitutively active STING immune potentiator construct. The constitutively active STING immune potentiator used in this example contained a V155M mutation, as described in Example 5. The ADRvax and STING constructs were coformulated in an SM102 cationic lipid nanoparticle (comprising Compound 25) at varying Ag:STING ratios, according to the study design summarized below in Table 13.

TABLE 13

| | | | STING | | Total | | | |
|---|---|---|---|---|---|---|---|---|
| | Ag:STING | Ag dose | dose | NTFIX | mRNA | | | Dosing |
| Group | ratio | (μg) | (μg) | (μg) | (μg) | Vehicle | Route | Regimen |
| 1 | No Ag | 0 | 3 | 3 | 6 | SM102 | IM | Day 1, |
| | control | | | | | | | 15 |
| 2 | 1:1 | 3 | 3 | 0 | | | | |
| 3 | 5:1 | | 0.6 | 2.4 | | | | |
| 4 | 10:1 | | 0.3 | 2.7 | | | | |
| 5 | 20:1 | | 0.15 | 2.85 | | | | |
| 6 | 1:0 (No | | 0 | 3 | | | | |
| | STING) | | | | | | | |
| 7 | 1:1 | 5 | 5 | 0 | 10 | | | |
| 8 | 1:0 (No | | 0 | 5 | | | | |
| | STING) | | | | | | | |

[1598] Mice were dosed intramuscularly on days 1 and 15. At day 21, CD8⁺ spleen cells from mice in each test group were restimulated ex vivo for 4 hours at 37 degrees C. in the presence of GolgiPlug™ (containing Brefeldin A; BD Biosciences) with either wild-type or mutant MC38 ADR peptides (1 μg/ml per peptide, pooled) and CD8 vaccine responses were assessed by intracellular staining (ICS) for IFN-γ or TNF-α. Representative ICS results for MC38 ADR-specific responses by day 21 CD8⁺ spleen cells for IFN-γ are shown in FIG. 22 and for TNF-α are shown in FIG. 23. Comparable results were observed with day 21 PBMCs. Furthermore, the experiment was carried out through 54 days, with the day 54 spleen cells results being comparable to the results observed for the day 21 spleen cells. Additionally, CD8 vaccine responses to each of the three individual epitopes within ADRvax (i.e., peptides Adpk1, Reps1 and Dpagt1) were also assessed by ICS for IFN-γ following stimulation with the individual epitopes. The results are shown in FIG. 24A (for peptide Adpk1), FIG. 24B (for peptide Reps1) and FIG. 24C (for peptide Dpagt1).

[1599] The results demonstrate that all Ag:STING ratios tested (ranging from 1:1 to 20:1) showed an adjuvant effect of STING as compared to control. For the ADRvax antigen as a whole, the optimal Ag:STING ratio was found to be 5:1. For the individual peptide epitopes within ADRvax, the optimal Ag:STING ratio for the Adpgk1 peptide was 5:1, whereas the optimal Ag:STING ratio for the Reps1 peptide was 10:1 (the responses to the third peptide, Dpagt1, were very low with or without STING, consistent with it being a non-dominant epitope as was known in the art). STING was also found to increase the total percentage of CD8+ cells among CD45+ T cells, with dose responses observed (data not shown) and was found to increase the total percentage of CD62L cells among CD44hi CD8+ cells (effector/memory subset), with dose responses observed (data not shown). Furthermore, results obtained from PBMC cells were consistent with the spleen cell results (data not shown). Thus, these experiments confirmed the ability of STING to act as an immune potentiator in enhancing immune responses against the ADRvax antigen and, moreover, demonstrated the determination of an optimal Ag:Immune Potentiator ratio for treatment, with ratios other than 1:1 being found to be most optimal (e.g., ratios of 5:1 or 10:1 being more effective than 1:1). The results further indicate that the optimal Ag:Immune Potentiator ratio may differ depending on the particular antigen of interest used.

[1600] In a second set of experiments, non-human primates were treated with an HPV vaccine encoding intracellular E6/E7 (iE6/E7), as described in Example 5, in combination with the constitutively active STING immune potentiator construct at varying Ag:STING ratios (coformulated in SM102 cationic lipid nanoparticles), according to the study design summarized below in Table 14.

TABLE 14

| | | Ag:STING | | | | | Total Ag |
|---|---|---|---|---|---|---|---|
| Group | Treatment | Ratio | μg Ag | μg STING | μg NTFIX | n | Dose |
| 1 | STING only | — | — | 100 | — | 3 | 100 μg |
| 2 | Ag:STING | 1:1 | 50 | 50 | — | | |
| 3 | Ag:STING | 5:1 | 83.33 | 16.67 | — | | |
| 4 | Ag:STING | 10:1 | 90.9 | 9.09 | | | |
| 5 | Ag only | — | 90 | — | 10 | | |

[1601] No clinical findings were observed 24 hours after the first dose (administered intramuscularly), indicating no injection site reactions and that the initial treatment was received safely. After an initial dosing on day 1, animals have a two week recovery period and then are given a second dose at day 14, followed by another two week recovery period. Further safety analysis is determined by clinical pathology (clinical chemistry, hematology and coagulation) at days 2, 16 and 30. Anti-antibody and ELISpot analysis or ICS for IFN-γ for CD4 and CD8 cells are performed to assess enhancement of immune responses to the HPV vaccine by STING at the varying ratios tested.

[1602] In a third set of experiments, a model concatemeric antigen using known murine epitopes was tested in mice in combination with the constitutively active STING immune potentiator at varying ratios. The concatemeric antigen, referred to herein as CA-132, comprises 20 known murine epitopes thought to be presented on MHC Class I and Class II antigens of the CB6 mouse. These epitopes were sourced from the IEDB.org website, a public database of epitopes sourced from the literature. Class I epitopes are expected to be presented on MHC Class I molecules and trigger a CD8+ response, while Class II epitopes are expected to be presented on MHC Class II molecules and trigger CD4+ T cell responses. The CA-132 antigen construct encodes both Class I and Class II epitopes, allowing for assessment of both CD4 and CD8 T cell responses. Moreover, it is believed that inclusion of Class II epitopes in the concatemeric antigen (thus triggering a CD4 response) helps induce a stronger CD8 T cell response. Thus, the approach to the design of the CA-132 antigen can also be used in the design of other concatemeric antigen constructs (e.g., for personalized cancer vaccines or for bacterial vaccines, as described herein).

[1603] The CA-132 antigen construct and STING immune potentiator construct were coformulated in SM102 cationic lipid nanoparticles and administered intramuscularly to CB6 mice at the following dosages: CA-132 alone at 1 μg, 3 μg or 10 μg, STING alone at 3 μg, CA-132+STING at either 3 μg each or 1 μg each (1:1 ratio), CA-132 at 3 μg and STING at 1 μg (Ag:STING ratio of 3:1) or CA-132 at 1 μg and STING at 3 μg (Ag:STING ratio of 1:3). Antigen-specific T cell responses to the Class I epitopes within the CA-132 antigen construct were examined by ELISpot analysis for IFN-γ, the results of which are shown in FIG. 25. The results demonstrated an increase in IFN-γ responses to the Class I epitopes when formulated with STING. These results were confirmed by restimulation of CD8+ T cells with one of the Class I epitopes within the CA-132 antigen (epitope CA-87), followed by ELISpot analysis for IFN-γ, the results of which are shown in FIG. 26. These results demonstrated the ability of STING to immunopotentiate the antigen-specific CD8+ T cell responses at Ag:STING ratios of 1:1, 3:1 and 1:3.

[1604] In a fourth set of experiments, C57/Bl6 mice were treated on days 1 and 14 with an HPV16 E7 vaccine (described in Example 5), in combination with the constitutively active STING immune potentiator construct at varying Ag:STING ratios. The mRNAs were coformulated in lipid nanoparticles comprising: Compound 25:Cholesterol:DSPC:PEG-DMG (at ratios of 50:38.5:10:1.5, respectively) according to the study design summarized below in Table 15.

TABLE 15

| | | Ag:STING | μg | μg |
|---|---|---|---|---|
| Group | Treatment | Ratio | Ag | STING |
| 1 | STING only | — | 0 | 3 |
| 2 | Ag:STING | 1:1 | 3 | 3 |
| 3 | Ag:STING | 5:1 | 3 | 0.6 |
| 4 | Ag:STING | 10:1 | 3 | 0.3 |
| 5 | Ag:STING | 20:1 | 3 | 0.15 |
| 6 | Ag only | 0 | 3 | 0 |
| 7 | Ag:STING | 1:1 | 5 | 5 |
| 8 | Ag only | 0 | 5 | 0 |

On day 21, mice were sacrificed and IFN-γ expression by CD8+ T cells was assessed by ICS as described herein. The results are shown in FIG. 27, which demonstrates a strong immunopotentiating effect of the STING mRNA construct at Ag: STING ratios of 1:1, 5:1 and 10:1.

[1605] In summary, these studies confirmed the ability of the STING immune potentiator construct to enhance immune responses to an antigen of interest and demonstrated the determination of optimal Ag: STING ratios for treatment.

### Example 12: Immune Potentiation by STING in Non-Human Primates

[1606] In this example, non-human primates (cynomolgus monkeys) were treated with mRNAs encoding an HPV vaccine in combination with a STING immune potentiator, followed by assessment of antigen-specific T cell and antibody responses. The HPV vaccine construct used in this example is described in Example 5. The constitutively active STING immune potentiator construct used in this example contained a V155M mutation, as described in Example 5. The HPV vaccine construct and the immune potentiator mRNA constructs were coformulated in lipid nanoparticles comprising: Compound 25:Cholesterol:DSPC:PEG-DMG, at ratios of 50:38.5:10:1.5, respectively. Different ratios of STING:Ag were tested. Control animals were treated with mRNAs encoding either the HPV antigens alone or the STING immune potentiator alone.

[1607] Fifteen male cynomolgus monkeys, 2-5 years old and weighing 2-5 kg, were treated according to the study design shown below in Table 16.

TABLE 16

| | | | Total | | | HPV | |
|---|---|---|---|---|---|---|---|
| | | | mRNA | | STING | Ag | |
| Group | Desc. | Ratio | (μg) | NTFIX | (μg) | (μg) | n |
| 1 | Ag only | | 100 | 10 | | 90 | 3 |
| 2 | STING only | | 100 | | 100 | 0 | 3 |
| 3 | STING:Ag | 1:1 | 100 | | 50 | 50 | 3 |
| 4 | STING:Ag | 1:5 | 100 | | 17 | 83 | 3 |
| 5 | STING:Ag | 1:10 | 100 | | 9 | 91 | 3 |

[1608] A pre-dose sample of PBMCs were collected on day −7, followed by treatment of the animals intramuscularly with the mRNA LNPs on day 1 and day 15. A post-dose sample of PBMCs was collected on day 29. No toxicity or other major clinical observations were noted during the study, indicating the mRNA LNPs were well-tolerated.

[1609] To examine the ability of the STING immune potentiator to enhance antigen-specific CD8+ T cell responses, intracellular cytokine staining (ICS) for TNFα and IL-2 was conducted. PBMCs were stimulated ex vivo with the HPV16 E6 peptide pool or the HPV16 E7 peptide pool for 6 hours at 37° C. Stimulation with PMA/ionomycin was used as a positive control and stimulation with medium alone was used as a negative control.

[1610] Representative results for ICS for TNFα are shown in FIGS. 28A-28C, wherein FIG. 28A shows results for ex vivo stimulation with the E6 peptide pool, FIG. 28B shows the results for ex vivo stimulation with the E7 peptide pool and FIG. 28C shows the results for ex vivo stimulation with the medium control. No increase in TNFα+CD8 T cell frequency was observed between the pre- and post-dose group immunized with antigen alone (Group 1). Immunization with STING treatment alone (Group 2) had a marginal effect on TNFα+CD8 T cell frequency. In contrast, groups immunized with STING+Ag (Groups 3, 4, 5) showed a significant increase in antigen-specific TNFα+CD8 T cells. Furthermore, Group 5, which was immunized with a “matching” antigen dose of STING:Ag (1:10 ratio), showed a significant increase in antigen-specific TNFα+CD8 T cells when compared to the Group 1 and Group 2 controls.

[1611] Representative results for ICS for IL-2 are shown in FIGS. 29A-29C, wherein FIG. 29A shows results for ex vivo stimulation with the E6 peptide pool, FIG. 29B shows the results for ex vivo stimulation with the E7 peptide pool and FIG. 29C shows the results for ex vivo stimulation with the medium control. A moderate increase in IL-2+CD8 T cell frequency between the pre- and post-dose was observed in all immunized animals (Groups 1-5). However, the increase in IL-2+ CD8 T cells was most detectable in the groups treated with STING:Ag at ratios of 1:1 and 1:5 (Groups 3 and 4), whereas animals treated with STING:Ag at a 1:10 ratio did not exhibit increased IL-2+ CD8 T cells as compared to controls. The increase in IL-2 is consistent with the known ability of subsets of T cells to secrete IL-2 during active T cell responses.

[1612] To examine the effect of STING:Ag treatment in the NHPs on antigen-specific antibody responses, E6-specific and E7-specific ELISAs were performed. Plates were coated with either recombinant E6 (Prospec; #HPV-005 His HPV16 E6) or recombinant E7 (ProteinX; #2003207 His HPV16 E7). A mouse anti-E6 monoclonal antibody from Alpha Diagnostics International (#HPV16E6 1-M) was used as a positive control. A mouse anti-E7 monoclonal antibody from Fisher/Life Technologies (#280006-EA) was used as a positive control. An anti-mouse IgG-HRP antibody from Jackson ImmunoResearch (#715-035-150) was used as the secondary antibody for the positive controls. Anti-monkey IgG-HRP from Abcam (#ab 112767) was used as the secondary antibody for the NHP serum.

[1613] Plates were coated with recombinant E6 or E7 (500 ng/well; 100 μl/well) at 4° C. overnight and then blocked with TBS SuperBlock for 1 hour at room temperature. Primary antibody was added (100 μl/well) and incubated for 1 hour at room temperature. Positive control antibodies were serially diluted. NHP serum was diluted 1:5000. After washing, secondary antibody was added (100 μl/well) and incubated for 1 hour at room temperature. Positive control anti-mouse IgG-HRP was diluted 1:5000. For the NHP serums, anti-monkey IgG-HRP was diluted 1:30,000. Color was developed for 5 minutes (anti-E6) or for 10 minutes (anti-E7), then stopped and read at 450 nm.

[1614] Representative results for anti-HPV16 E6 IgG are shown in FIG. 30. Representative results for anti-HPV16 E7 IgG are shown in FIG. 31. The results for both anti-E6 and anti-E7 demonstrate that treatment of the animals with STING:Ag, particularly at ratios of 1:5 and 1:10 led to increased antigen-specific antibody responses.

[1615] Accordingly, the results described herein for the non-human primate study confirm that STING immunopotentiates antigen-specific T cell and antibody responses against an mRNA vaccine antigen in vivo.

### Example 13: Immunogenicity of Various KRAS-STING Vaccines Formats in HLA*A11 Transgenic Mice

[1616] In this example, to examine the effect of the STING immune potentiator mRNA construct on immune responses to various different forms of the mutant KRAS peptide antigen mRNA constructs, HLA*A*11:01 Tg mice (Taconic, strain 9660F, n=3) were administered mRNA encoding various different forms of mutated KRAS peptide antigen mRNA constructs in combination with a STING immune potentiator mRNA construct as follows: mRNA encoding mutated KRAS in combination with STING administered on days 0 and 14, animals sacrificed on day 21. Mice were aged 6-9 weeks at day 0. mRNA was administered to the animals at a dose of 0.5 mg/kg (10 ug per 20-g animal). The KRAS and STING constructs are administered at a 5:1 ratio (Ag:STING). mRNA constructs were coformulated in an SM102 cationic lipid nanoparticle (comprising Compound 25).

[1617] The types of mutated KRAS constructs tested were as follows: (i) mRNA encoding a single mutant KRAS 25mer peptide antigen containing either the G12D, G12V, G13D or G12C mutation (“monomer”); (ii) mRNA encoding a concatemer of three 25mer peptide antigens (thus creating a 75mer), one of each containing the G12D, G12V and G13D mutations (“KRAS-3MUT concatemer”); (iii) mRNA encoding a concatemer of four 25mer peptide antigens (thus creating a 100mer), one of each containing the G12D, G12V, G13D and G12C mutations (“KRAS-4MUT concatemer”); or (iv) four separate mRNAs coadministered together, each encoding a single mutant KRAS 25mer peptide antigen containing either the G12D, G12V, G13D or G12C mutation (“pooled monomers”). The amino acid and nucleotide sequences of the constructs are as described in Example 9. An A11-viral epitope concatemer antigen was also tested in combination with STING or a control mRNA (NTFIX) (“validated A11 Ag”).

[1618] The test groups are shown in Table 17 as follows:

TABLE 17

| TEST | | Test/Control | Immune | | | Dosing |
|---|---|---|---|---|---|---|
| group | Group | Material | Potentiator | Vehicle | Route | Regimen |
| KRAS-MUT | 1 | KRAS G12D | STING (V155M) | Compound 25 | IM | Day 1, 14 |
| Monomer | 2 | KRAS G12V | STING (V155M) | Compound 25 | IM | Day 1, 14 |
| | 3 | KRAS G13D | STING (V155M) | Compound 25 | IM | Day 1, 14 |
| | 4 | KRAS G12C | STING (V155M) | Compound 25 | IM | Day 1, 14 |
| KRAS-MUT | 5 | KRAS-3MUT | STING (V155M) | Compound 25 | IM | Day 1, 14 |
| Concatemer | 6 | KRAS-4MUT | STING (V155M) | Compound 25 | IM | Day 1, 14 |
| | 7 | KRAS-4MUT.var1 | STING (V155M) | Compound 25 | IM | Day 1, 14 |
| Pooled | 8 | G12D + G12V + | STING (V155M) | Compound 25 | IM | Day 1, 14 |
| Monomers | | G12C + G13D | | | | |
| Validated | 9 | A11-Viral epitope | STING (V155M) | Compound 25 | IM | Day 1, 14 |
| A11 Ags | | concatemer | | | | |
| | 10 | A11-Viral epitope | NTFIX | Compound 25 | IM | Day 1, 14 |
| | | concatemer | | | | |

[1619] In a first set of experiments to evaluate antigen-specific CD8+ T cell responses to the KRAS antigens, day 21 spleen cells from the mice were restimulated ex vivo with KRAS monomer peptides (2 ug/ml per peptide) for 5 hours at 37 degrees Celsius in the presence of GolgiPlug (Brefeldin A). Intracellular cytokine staining (ICS)(IFN-γ) was performed for KRAS G12D (aa*7/8-16), KRAS G12V (aa*7/8-16), KRAS G13D (aa*7/8-16), G12C (aa*7/8-16), KRAS WT (aa*7/8-16) and no peptide.

[1620] The ICS results for KRAS-G12V-specific responses are shown in FIG. 32. The ICS results for KRAS-G12D-specific responses are shown in FIG. 33. These results demonstrate that anti-KRAS-G12V and anti-KRAS-G12D specific CD8+ T cells were detected in mice immunized with the corresponding KRAS-STING vaccine (monomer or concatemer) and restimulated with the cognate peptide. Comparable % IFN-gamma positive CD8+ T cells were seen when the KRAS mutations were administered to the mice as a monomer or as concatemers. The responses observed with G12V were stronger than the responses observed with G12D. In this experiment, anti-KRAS G12C and anti-KRAS G13D responses were not observed (data not shown).

[1621] In a second set of experiments to evaluate antigen-specific CD8+ T cell responses to KRAS antigens, day 21 spleen cells from the mice were co-cultured with HLA*A11-expressing target cells (Cos7-A11 cells) that had been pulsed with the corresponding KRAS peptides (G12V, G12D or WT control), followed by ICS (IFN-γ). The Cos7-A11 co-culture results for KRAS-G12V-specific responses are shown in FIG. 34. The Cos7-A11 co-culture results for KRAS-G12D-specific responses are shown in FIG. 35. These results demonstrate that anti-KRAS-G12V and anti-KRAS-G12D specific CD8+ T cell responses were detected in mice immunized with the corresponding KRAS-STING vaccine (monomer or concatemer) and restimulated with the A11+ expressing cell line pulsed with G12V or G12D. Thus, the results in this second set of experiments with respect to detection of antigen-specific CD8+ T cell responses to the KRAS antigens were very similar to the results from the first set of experiments using restimulation with cognate peptides.

[1622] Finally, the ability of STING to potentiate antigen-specific response to known A*11-restricted viral epitopes was evaluated using day 21 spleen cells from the mice immunized with an A11-viral epitope concatemer. Eight viral epitopes (EBV BRLF1, FLU, HIV NEF, EBV, HBV core antigen, HCV, CMV and BCL-2L1) (25 amino acids each) were concatemerized and encoded by mRNA for use as an antigen in combination with STING in the A11-transgenic mice (treatment group 9 in Table 17). The A11-viral epitope concatemer was also co-administered with an NTFIX control mRNA (treatment group 10 in Table 17). Five of the eight epitopes (EBV BRLF1, FLU, HIV NEF, EBV, HBV core antigen) were validated A11 binders with relatively low predicted IC50s; the other three epitopes (HCV, CMV and BCL-2L1) had more moderate predicted affinities for A11 but have not been experimentally validated. The amino acid sequences for the viral epitopes, as well as their IC50s, are shown below in Table 18.

TABLE 18

| | | ann_ | % | Literature |
|---|---|---|---|---|
| Gene | Peptide | IC50 | rank | validation |
| BV BRLF1 | ATIGTAMYK | 6.03 | 0.2 | Y |
| | (SEQ ID NO: 1388) | | | |
| FLU | SIIPSGPLK | 5 | 0.25 | Y |
| | (SEQ ID NO: 1389) | | | |
| HIV NEF | AVDLSHFLK | 20.31 | 0.25 | Y |
| | (SEQ ID NO: 1390) | | | |
| EBV | AVFDRKSDAK | 55.63 | 0.5 | Y |
| | (SEQ ID NO: 1391) | | | |
| HBV core | YVNVNMGLK | 69.82 | 0.5 | Y |
| antigen | (SEQ ID NO: 1392) | | | |
| HCV | RVCEKMALY | 304.91 | 1.3 | |
| | (SEQ ID NO: 1393) | | | |
| CMV | KLGGALQAK | 736.59 | 1.6 | |
| | (SEQ ID NO: 1394) | | | |

[1623] Day 21 spleen cells were restimulated ex vivo with the individual A*11 viral epitopes, followed by ICS (IFN-γ and TNF-α), to detect antigen-specific CD8+ T cell responses. Antigen-specific CD8+ T cell responses were observed for four out of the eight viral epitopes (EBV, EBV BRLF1, FLU and HIV NEF) and, as shown in FIG. 36, STING potentiated T cell responses for three of these viral epitopes (EBV, EBV BRLF1 and FLU).

[1624] Accordingly, the results described herein for HLA*A11 transgenic mice demonstrate that STING immunopotentiates antigen-specific T cell anti-KRAS responses, as well as anti-viral responses to other A11-restricted viral antigens, and is able to immunopotentiate responses to vaccine antigens in various formats (monomers and concatemers).

### Example 14: Immunopotentiation of STING is Reconstituted by Activation of Type 1 Interferon and NFκB

[1625] In this example, the HPV vaccine mouse model system was used to compare the immunopotentiation effect of STING to that of immune potentiators that either activate Type 1 interferon (constitutively active IRF3 and IRF7) or activate NFκB (constitutively active IKKβ). The STING mRNA construct (V155M mutation) is described in Example 1. The constitutively active IRF3 and IRF7 mRNA constructs are described in Example 2. The constitutively active IKKβ construct is described in Example 3. The HPV vaccine mouse model system is described in Example 5. Mice were immunized with the HPV vaccine in combination with either: (i) a control construct (NTFIX), (ii) the STING construct, (iii) the IRF3/IRF7 constructs, or (iv) the IRF3/IRF7/IKKβ constructs.

[1626] Day 21 spleen cells from mice in each test group were restimulated ex vivo for 4 hours at 37 degrees C. in the presence of GolgiPlug™ (containing Brefeldin A; BD Biosciences) with either E7 single peptides (3 individual peptides) or an E7 peptide pool, as described in Example 5. CD8 vaccine responses were assessed by intracellular staining (ICS) for IFN-γ or TNF-α. Representative ICS results for E7-specific responses by day 21 spleen cells for IFN-γ and TNF-α are shown in FIG. 37A (IFN-γ) and FIG. 37B (TNF-α). The experiment was carried out through 50 days, with the day 50 spleen cells results being comparable to the results observed at day 21. The results demonstrate that the combination of constitutively active IRF3+constitutively active IRF7+constitutively active IKKβ recapitulated the STING-mediated adjuvant phenotype. Thus, these results demonstrate that the immune potentiating potency of STING can be reconstituted by use of constructs that activate Type 1 Interferon and NFkB.

### Example 15: Immunopotentiation by Modulation of Intracellular Pathways

[1627] In this example, the immunopotentiation effect of STING was compared to that of immune potentiators that modulate intracellular pathways. Immune potentiator mRNA constructs encoding TAK1, TRAM or MyD88, each of which is an intracellular signaling protein that operates downstream of TLRs, were tested. The constitutively active STING construct (V155M) is described in Example 1. A representative amino acid sequence encoded by a TAK1 construct is shown in SEQ ID NO: 164 (encoded by the exemplary nucleotide sequences shown in SEQ ID NOs: 1411 and 1482). A representative amino acid sequence encoded by a TRAM construct is shown in SEQ ID NO: 136 (encoded by the exemplary nucleotide sequences shown in SEQ ID NOs: 1410 and 1481). Representative amino acid sequences encoded by MyD88 constructs are shown in SEQ ID NO: 134 (encoded by the exemplary nucleotide sequences shown in SEQ ID NOs: 1409 and 1480) and SEQ ID NO: 135. Mice were immunized with mRNA encoding ovalbumin as a test antigen in combination with an mRNA construct encoding either: (i) STING, (ii) TAK1, (iii) TRAM, or (iv) MyD88. The OVA antigen mRNA construct and the immune potentiator mRNA construct were coformulated in lipid nanoparticles comprising: Compound 25:Cholesterol:DSPC:PEG-DMG, at ratios of 50:38.5:10:1.5, respectively. Mice were immunized intramuscularly on days 1 and 15 at 0.5 mg/kg.

[1628] Day 25 spleen cells from mice in each test group were restimulated ex vivo for 4 hours at 37 degrees C. in the presence of GolgiPlug™ (containing Brefeldin A; BD Biosciences) with an OVA peptide (MHC Class I). CD8 vaccine responses were assessed by intracellular staining (ICS) for IFN-γ, TNF-α or IL-2. Representative ICS results for OVA-specific responses by day 25 spleen cells for IFN-γ, TNF-α and IL-2 are shown in FIG. 38A (IFN-γ), FIG. 38B (TNF-α) and FIG. 38C (IL-2). The experiment was carried out through 50 days, with the day 50 spleen cells results being comparable to the results observed at day 25. The results demonstrate that the TAK1, TRAM and MyD88 constructs showed immunopotentiating activity similar to STING. Thus, these results demonstrate that immune responses can be potentiated by modulating intracellular pathways using mRNA constructs encoding components of such intracellular pathways, in particular components that function downstream of TLRs.

### Example 16: Immunopotentiation by Adaptor Proteins and by Inflammasome or Necroptosome Induction

[1629] In this example, the immune potentiation ability of a panel of mRNA constructs was compared in mice using ovalbumin as a test antigen (as described in Example 15). The panel of mRNA constructs encoded either the adaptor proteins STING or MAVS (mitochondrial antiviral signaling protein), constitutively active IKKβ (which activates NFκB), caspases 1/4 (involved in inflammasome induction) or MLKL (involved in necroptosome induction). The constitutively active STING construct (V155M) is described in Example 1. The constitutively active IKKβ construct is described in Example 3 and encodes the amino acid sequence shown in SEQ ID NO: 152 (encoded by the exemplary nucleotide sequences shown in SEQ ID NOs: 153 and 1397). A representative amino acid sequence encoded by a MAVS construct is shown in SEQ ID NO: 1387 (encoded by the exemplary nucleotide sequences shown in SEQ ID NOs: 1413 and 1484). Representative amino acid sequence encoded by MLKL constructs are shown in SEQ ID NOs: 1327 (encoded by the exemplary nucleotide sequences shown in SEQ ID NOs: 1412 and 1483) and 1328. Representative amino acid sequences encoded by caspase-1 constructs are shown in SEQ ID NOs: 175-178 (encoded by the exemplary nucleotide sequences shown in SEQ ID NOs: 1395 and 1467). Representative amino acid sequences encoded by caspase-4 constructs are shown in SEQ ID NOs: 1352-1356 (encoded by the exemplary nucleotide sequences shown in SEQ ID NOs: 1396 and 1468). Mice were immunized with mRNA encoding ovalbumin as a test antigen in combination with an mRNA construct encoding either: (i) STING; (ii) MAVS; (iii) IKKβ; (iv) Caspase 1/4+IKKβ; (v) MLKL; or (vi) MLKL+STING. The NTFIX construct and DMXAA (a chemical activator of STING-dependent innate immunity pathways) were used as controls. The OVA antigen mRNA construct and the immune potentiator mRNA construct were coformulated in lipid nanoparticles comprising: Compound 25:Cholesterol:DSPC:PEG-DMG, at ratios of 50:38.5:10:1.5, respectively. Mice were immunized intramuscularly on days 1 and 15 at 0.5 mg/kg.

[1630] Spleen cells from mice in each test group were restimulated ex vivo for 4 hours at 37 degrees C. in the presence of GolgiPlug™ (containing Brefeldin A; BD Biosciences) with an OVA peptide (MHC Class I). Antigen-specific CD8 responses were assessed by intracellular staining (ICS) for IFN-γ. Representative ICS results for OVA-specific responses by day 21 spleen cells for IFN-γ are shown in FIG. 39. Representative ICS results for OVA-specific responses by day 50 spleen cells for IFN-γ are shown in FIG. 40. The results demonstrate that the adaptor compounds (STING and MAVS), induction of the inflammasome (by Caspase 1/4+IKKβ) or induction of the necroptosome (by MLKL) all resulted in immunopotentiation of antigen-specific CD8 responses. Furthermore, the combination of MLKL and STING exhibited enhanced activity as compared to MLKL alone. Moreover, the day 50 results demonstrate the immune potentiation effect was durable. These results demonstrate that immune responses can be potentiated by adaptor proteins, by induction of the inflammasome or by induction of the necroptosome.

### Example 17: Comparison of Constitutively Active STING Constructs

[1631] In this example, C57/Bl6 mice were immunized with an OVA antigen-encoding mRNA construct co-formulated or co-administered with different constitutively active STING mutant mRNA constructs. The constitutively active STING constructs tested were: (i) p23 (V155M); (ii) p57 (R284M/V147L/N154S/V155M); (iii) p56 (V147L/N154S/V155M); and (iv) p19 (R284M). All constructs were tested co-formulated with the OVA antigen construct. The p23 construct also was tested co-administered with the OVA antigen construct but formulated separately. Mice were immunized on day 1 and day 14.

[1632] On day 21, mice were sacrificed and IFN-γ expression by CD8+ T cells was assessed by ICS as described herein. The results are shown in FIG. 41A, which demonstrates that all constitutively active STING mutant constructs tested exhibited the ability to immunopotentiate the antigen-specific CD8+ T cell response to the OVA antigen in vivo (as compared to the NTFIX control). Additionally, the p23 construct immunopotentiated the antigen-specific CD8+ T cell responses both when it was coformulated with the OVA antigen construct and when it was co-administered with the OVA antigen construct but formulated separately. Furthermore, on day 90, mice were sacrificed and IFN-γ expression by CD8+ T cells was assessed by ICS as described herein. The results are shown in FIG. 41B, which demonstrates that the immune potentiating effect of the constitutively active STING mutant constructs is durable.

### Example 18: Role of CD4 and CD8 T Cells in STING-Mediated Immunopotentiation

[1633] In this example, CD4-depleted or CD8-depleted mice were used to evaluate the role of CD4+ or CD8+ T cells in STING-mediated immunopotentiation. In a first series of experiments, to deplete CD4 cells, mice were injected intraperitoneally with the anti-CD4 mAb GK1.5 on days −3, −1, 11 and 13 of the experiment. Depletion efficiency was confirmed by flow cytometry. Mice were vaccinated on days 1 and 15 with the HPV16 E6/E7 antigen vaccine coformulated with the STING construct (V155M) intramuscularly at a dosage of 0.5 mg/kg. The vaccine and STING mRNA constructs were coformulated in lipid nanoparticles comprising: Compound 25:Cholesterol:DSPC:PEG-DMG, at ratios of 50:38.5:10:1.5, respectively, at a 1:1 ratio.

[1634] On days 21 and 50, mice were sacrificed and IFN-γ expression by CD8+ T cells was assessed by ICS as described herein. The results are shown in FIG. 42A (day 21) and FIG. 42B (day 50). Similar results were observed for TNF-α expression by CD8+ T cells as assessed by ICS (data not shown). The results demonstrate that the adjuvant effect mediated by STING is largely independent of CD4+ T cell help.

[1635] In a second series of experiments, the role of CD4 and CD8 T cells in the effect of the HPV-STING vaccine on tumor cell growth was examined using the TC1 model described in Example 10. TC1 HPV cells (2×10⁵ cells) were implanted subcutaneously into C57/B6 mice and tumors were grown to a volume size of 100 mm³, which became day 1. On days 1 and 8, mice were administered the HPV16 E6/E7 soluble antigen vaccine coformulated with the STING construct (V155M) (1:1 ratio of sE6/E7 and STING) intramuscularly at a dosage of 10 μg. Control mice were treated with PBS only. Furthermore, on days 1, 4, 7, 10 and then biweekly until the end of the study, mice were treated with either anti-CD4 (GK1.5 mAb) or anti-CD8 (2.43 mAb) to deplete CD4 T cells or CD8 cells, respectively. Control mice were untreated with depleting antibody. The treatment groups and corresponding dosages are provided in Table 19.

TABLE 19

| | | Vax | | |
|---|---|---|---|---|
| Tumor | | dose 1 | Vax | |
| size | | (day 1), | dose 2 | |
| (mm³) | Group | μg | (day 8) μg | Treatment |
| 100 | PBS | none | none | none |
| | sE6/7 + STING (1:1) | 10 | 10 | PBS |
| | sE6/7 + STING (1:1) | 10 | 5 | anti-CD8 (2.43) |
| | sE6/7 + STING (1:1) | 10 | 10 | anti-CD4 (GK1.5) |

[1636] The results are shown in FIG. 43, which shows tumor volume over the course of 22 days. The results demonstrate that depletion of CD4+ T cells did not significantly affect the anti-tumor efficacy of the HPV-STING vaccine, whereas the depletion of CD8+ T cells did affect the anti-tumor efficacy of the HPV-STING vaccine, thereby demonstrating that the efficacy of the vaccine is dependent on CD8+ T cells but not on CD4+ T cells.

### Example 19: STING Skews CD8 Cells to Effector Memory Phenotype

[1637] In this example, to further confirm the results reported in Examples 5 and 6 regarding CD62L^{lo} effector memory cells, additional experiments were performed in which C57/Bl6 mice were immunized with various concentrations of MC38 vaccine coformulated with various concentrations of STING immune potentiator mRNA construct. The amounts/ratios of Ag and STING used were the same as set forth in Table 15 of Example 11. Mice were immunized on days 1 and 14. On days 21 and 54, the percentage of CD62L^{lo} effector memory cells among CD44^{hi}CD8+ cells was examined. The results are shown in FIG. 44A (day 21) and FIG. 44B (day 54). The results demonstrate that the STING immune potentiator mRNA construct skews the CD8 cell population to the effector memory phenotype (CD62L^{lo} cells).

### Example 20: STING Immunopotentiates Responses to a Concatemeric Vaccine at a Variety of Different Antigen:STING Ratios

[1638] In this example, whether an immune potentiator, such as constitutively active STING, can boost T-cell responses to a concatemeric vaccine was investigated. An mRNA construct encoding the CA-132 concatemer (described in Example 11), which encodes Class I and Class II epitopes, was used as the vaccine and the effect of the mRNA STING construct on T-cell responses to Class I and Class II epitopes was investigated. The CA-132 and STING mRNAs were either coformulated and delivered simultaneously, or were not coformulated, with a delayed delivery of STING mRNA. Animals were given a priming dose on day 1 and a boost on day 15. Splenocytes were harvested on day 21.

[1639] Different materials were tested in order to determine the immunogenicity when adding STING at various ratios to a concatemeric vaccine, to compare STING to top-ranked commercially available adjuvants, to determine whether the immunogenicity is dependent upon the timing of STING dosing, and to examine the immunogenicity of unformulated mRNA when dosed with STING. The following materials/conditions were tested: CA-132 (3 μg), CA-132 (3 μg) with Poly I:C (10 μg), CA-132 (3 μg) with MPLA (5 μg), STING (1 μg)/CA-132 (3 μg), STING (0.6 μg)/CA-132 (3 μg), STING (0.6 μg)/CA-57 (3 μg), STING (0.6 μg)/CA-132 (3 μg) (24 hours later), STING (0.6 μg)/CA-132 (3 μg) (48 hours later), STING (0.6 μg)/CA-132 (3 μg) (unformulated), and STING (6 μg)/CA-132 (30 μg) (unformulated). CA-57 is a concatemer of 5 Class II epitopes (all of which are contained within CA-132).

[1640] Results are shown in FIGS. 45-47. When the antigen-specific IFN-γ responses were examined with Class II epitopes, STING was found to boost the immune response to the MHC class II epitopes encoded by mRNA. STING behaved comparably to commercially available adjuvants (5-10 fold difference in dose). Although both ratios tested worked, the 1:5 STING:antigen ratio performed better than 1:3 combination (FIG. 45). Similar results were obtained using Class I epitopes as described above and shown in FIG. 46. Likewise, the 1:5 STING:antigen ratio was found to perform better than the 1:3 combination for class I epitopes.

[1641] Further, it was found that dosing STING at a later time point (24 hours) produced similar increases in immunogenicity to codelivery (FIG. 47).

[1642] In a further experiment, the effect of different STING:antigen ratios was examined using a 52 murine epitopes. Mice received a prime dose on day 1, a boost dose on day 8, and splenocytes were harvested on day 15. T cell responses to re-stimulation were evaluated using ELISpot and FACS. Restimulation of T cells in vitro was with peptides sequences corresponding to epitopes encoded within the concatemer. T cell responses to two Class II epitope peptides (CA-82 and CA-83) and four Class I epitope peptides (CA-87, CA-93, CA-113 and CA-90) were examined.

[1643] Quite surprisingly, it was found that the addition of STING across the majority of ratios tested improved T cell responses compared to antigen alone and never performed worse than antigen alone. The breadth of responsiveness was unexpected. For four of the six antigens (epitopes) tested, the addition of STING to antigen at the 10-30 ug total dose consistently produced higher T cell responses than that of the 50 ug dose of antigen alone. Thus, there is a wide bell curve in the ratio of STING:antigen for improved immunogenicity.

[1644] The study groups were as shown below in Table 20.

TABLE 20

| | sTING:Ag Ratio | | | | | | | | | | | |
|---|---|---|---|---|---|---|---|---|---|---|---|---|
| | 0:1 | | 20:1 | | 5:1 | | 1:1 | | 1:5 | | 1:20 | |
| Total | NTFIX | AG | STING | AG | STING | AG | STING | AG | STING | AG | STING | AG |
| mRNA (μg) | (μg) | (μg) | (μg) | (μg) | (μg) | (μg) | (μg) | (μg) | (μg) | (μg) | (μg) | (μg) |
| 0.15 | 2.85 | 0.15 | | | | | | | | | | |
| 0.5 | 9.5 | 0.5 | | | | | | | | | | |
| 1.5 | 28.6 | 1.5 | | | | | | | | | | |
| 3 | 27 | 3 | 2.85 | 0.15 | 2.4 | 0.6 | 1.5 | 1.5 | 0.6 | 2.4 | 0.15 | 2.85 |
| 10 | 20 | 10 | 9.5 | 0.5 | 8.3 | 1.4 | 5.0 | 5.0 | 1.4 | 8.3 | 0.5 | 9.5 |
| 30 | 0 | 30 | 28.6 | 1.4 | 25.0 | 4.2 | 15.0 | 15.0 | 4.2 | 25.0 | 1.4 | 28.6 |
| 50 | 0 | 20 | | | | | | | | | | |

[1645] Among the Class II epitopes, CA-82 (results shown in FIG. 48) and CA-83 (results shown in FIG. 49) showed that adding STING increased T cell responses at ratios less than 1:1 (STING:antigen) relative to the antigen only group, including at doses up to 50 μg antigen alone. The left panel of FIG. 49 shows that adding STING increased T cell response at all ratios relative to the antigen only group.

[1646] Similar results were seen with the Class I epitopes. CA-87 (results shown in FIG. 50), CA-93 (results shown in FIG. 51), CA-113 (results shown in FIG. 52), and CA-90 (results shown in FIG. 53) all showed that ratios of STING:antigen produced higher T cell responses relative to the antigen only group when compared to the total mRNA dose.

### Example 21: Fold Increase of STING-Mediated Immunopotentiation

[1647] In this example, to examine the magnitude of immune potentiation mediated by STING for a variety of antigens, mice were treated with STING in combination various antigens. In a first series of experiments, mice were treated with STING in combination with one of the following previously-described antigens: (i) HPV16 E7 (intracellular); (ii) HPV16 E7 (soluble); (iii) MC38 ADR neoantigen (intracellular); or (iv) OVA (soluble). 2.5 μg of the HPV16 E7 antigens or 5 μg of the MC38 ADR neoantigen was administered with 5 μg of STING. HPV16 E7 was co-formulated with E6, resulting in a 1:1 antigen:STING ratio for both the HPV and ADR antigens. On days 21 and 50+, spleen cells were harvested and T cells expressing IFN-γ were assessed by either intracellular staining (ICS) as described herein. The results were calculated as the fold-increase in immune responsive and are summarized below in Table 21 (day 21 results) and Table 22 (day 50+ results).

TABLE 21

| | | Fold increase (d21) | | | |
|---|---|---|---|---|---|
| Antigen | Format | Exp 1 | Exp 2 | Exp 3 | average |
| HPV16 E7 | intracellular | 33.90 | 22.56 | | 28.23 |
| HPV16 E7 | soluble | 2.50 | 3.98 | 6.31 | 4.26 |
| MC38 ADR neoantigen | intracellular | 4.57 | 11.67 | | 8.12 |
| OVA | soluble | 18.12 | 3.67 | 7.57 | 9.79 |

TABLE 22

| | | Fold change (d50+) | | | |
|---|---|---|---|---|---|
| Antigen | Format | Exp 1 | Exp 2 | Exp 3 | average |
| HPV16 E7 | intracellular | 13.33 | | | 13.33 |
| HPV16 E7 | soluble | 3.60 | 4.11 | 4.58 | 4.10 |
| MC38 ADR neoantigen | intracellular | 27.80 | 86.00 | | 56.90* |
| OVA | soluble | 29.85 | 4.93 | | 17.39 |

*= day 35

[1648] In a second series of experiments, mice were treated with STING in combination with the CA-132 concatemer vaccine described in Example 20 and antigen-specific T cells responses to various epitopes within the concatemer vaccine were assessed by ELISpot analysis for IFN-γ expression. The results were calculated as the fold-increase in immune responsive and are summarized below in Table 23

TABLE 23

| Epitope | Range of fold increase |
|---|---|
| CA-82 | 0.3-318 |
| CA-83 | 1.7-78 |
| CA-87 | 0.7-974 |
| CA-93 | 1.3-1148 |
| CA-113 | 1.5-725 |

[1649] The results demonstrate that while the fold-increase in immunoresponsiveness mediated by STING varied based on the antigen, for most antigens tested STING induced at least a 2-fold increase in immune responsiveness and for certain antigens exhibited even greater enhancement of immune responsiveness (e.g., more than 5-fold, more than 10-fold, more than 20-fold, more than 30-fold, more than 50-fold or more than 75-fold enhancement) relative to antigen alone (i.e., antigen+NTFIX mRNA).

### Example 22: MLKL mmRNA Constructs Induce Cell Death

[1650] In this example, a series of mmRNA constructs that encoded amino acid residues 1-180 of human or mouse MLKL were made and tested for their ability to induce cell death. These constructs typically also encoded an epitope tag at either the N-terminus or C-terminus to facilitate detection. Different epitope tags were tested (FLAG, Myc, CT, HA, V5). Additionally, all constructs contained a Cap 1 5′ Cap (7mG(5′)ppp(5′)NlmpNp), a 5′ UTR, a 3′ UTR, a poly A tail of 100 nucleotides and were fully modified with 1-methyl-pseudouridine (m1ψ). In certain constructs, the 3′ UTR included miR-122 and miR-142-3p binding sites. The amino acid sequences of the open reading frame (ORF) of the human and mouse MLKL 1-180 constructs without any epitope tag are shown in SEQ ID NOs: 1327 and 1328, respectively. Exemplary nucleotide sequences encoding the MLKL protein of SEQ ID NO: 1327 are shown in SEQ ID NOs: 1412 and 1483. Exemplary 5′ UTRs for use in the constructs are shown in SEQ ID NOs: 21 and 1323. An exemplary 3′ UTR for use in the constructs is shown in SEQ ID NO: 22. An exemplary 3′ UTR comprising miR-122 and miR-142-3p binding sites for use in the constructs is shown in SEQ ID NO: 23.

[1651] To determine wither the MLKL 1-180 constructs could induce cell death, the constructs were transfected into Hep3B human hepatoma cells. Twenty thousand HeLa cells/well were plated in 96 well plates and the mmRNA constructs were transfected into them using Lipofectamine 2000. After 24 hours, cell death was measured using the CellTiter-Glo® Luminescent Cell Viability Assay (Promega). The results are shown in FIG. 54, which demonstrates that the MLKL 1-180 mmRNA constructs were capable of inducing cell death of the HeLa cells.

[1652] These results were confirmed by conducting similar experiments with the MLKL 1-180 mmRNA constructs and Hep3B cells in the presence of YOYO-3® (Life Technologies), a DNA dye that is taken up preferentially by dead cells that is used to measure the extent of cell death. The experiments conducted using the YOYO-3® read-out system for cell viability, the results of which are shown in FIG. 55, confirmed that the MLKL 1-180 mmRNA constructs were capable of inducing cell death of the Hep3B hepatoma cells.

### Example 23: MLKL mmRNA Constructs Cause Necroptosis

[1653] In the example, the ability of the MLKL 1-180 mmRNA constructs to cause necroptosis was examined. Necroptosis is characterized by rupture of the plasma membrane and leakage of the cytosolic contents into the surrounding area. This can be tested for in in vitro assay by detection of damage-associated molecular patterns (DAMPs) leaking into the culture medium.

[1654] In a first series of experiments, the MLKL 1-180 mmRNA constructs were transfected into HeLa cells (as described in Example 22) and release of ATP, a DAMP, was measured as an indicator of necroptosis. Release of ATP was detected using the ENLITEN® ATP Assay (Promega). The results, which are shown in FIG. 56, demonstrate that the MLKL 1-180 mmRNA constructs induce the release of ATP from the cells, thereby indicating that the constructs are causing necroptosis.

[1655] To confirm that necroptosis was occurring, a second series of experiments were performed in which the MLKL 1-180 mmRNA constructs were transfected into HeLa cells and release of HMGB1, another DAMP, was measured as an indicator of necroptosis. Release of HMGB1 was detected using an HMGB1 ELISA assay. For this set of experiments, HeLa cells (2×10⁴ cells/100 μl/well) were transfected with a transfection mixture (20 μl) containing mRNA construct (200 ng/well; 1 μl volume), Lipofectamine (0.2 μl/well volume) and Opti-MEM (18.8 μl/well volume). Prior to transfection of the cells, the transfection mixture was incubated for 20 minutes at room temperature and then the transfection mixture was added on top of the cells. The culture plates were tapped gently and then incubated at 37° C., 5% CO₂ for 0, 1, 3 and 6 hrs. At each of these time points, 110 μl supernatant was removed, pooled and spun down at 1000 rpm. 50 μl of supernatant per transfection was used in a standard HMGB1 ELISA. The results are shown in FIG. 57, which demonstrate that the MLKL 1-180 mmRNA constructs induce the release of HMGB1 from the cells, thereby indicating that the constructs are causing necroptosis.

[1656] A third series of experiments examined the effect of treatment with an MLKL 1-180 mmRNA construct on cell surface expression of calreticulin (CRT), a DAMP molecule that is normally in the lumen of the endoplasmic reticulum but that translocates to the surface of dying cells after induction of necroptosis, where it mediates phagocytosis by macrophages and dendritic cells. Cells were either mock transfected, transfected with an apoptosis-inducing construct (“PUMA”) or transfected with an MLKL 1-180 mmRNA construct (huMLKL.4HB(1-180).cHA miR122/142-3p) and cell surface stained by standard methods for expression of calreticulin. The results are shown in FIG. 58, which demonstrates that the MLKL construct, but not the apoptosis-inducing construct, induced the translocation of CRT to the cell surface, thereby further confirming that the MLKL construct caused necroptosis.

[1657] A fourth series of experiments examined the effect of the inhibitor necrosulfonamide (NSA) on MLKL-induced cell death. NSA is an inhibitor that specifically targets MLKL. NSA was shown to inhibit cell death in a concentration dependent manner (measured using YOYO-3® as the read-out; data not shown) induced by the MLKL construct, thereby confirming that the observed cell death was necroptotic cell death induced by MLKL.

### Example 24: RIPK3 and GSDMD mmRNA Constructs Induce Cell Death

[1658] In this example, a series of mmRNA constructs that encoded RIP3K or GSDMD were made and tested for their ability to induce cell death. These constructs typically also encoded an epitope tag at either the N-terminus or C-terminus to facilitate detection. Different epitope tags were tested (FLAG, Myc, CT, HA, V5). Additionally, all constructs contained a Cap 1 5′ Cap (7mG(5′)ppp(5′)NlmpNp), a 5′ UTR, a 3′ UTR, a poly A tail of 100 nucleotides and were fully modified with 1-methyl-pseudouridine (m1ψ). The ORF amino acid sequences of the RIP3K constructs without any epitope tag are shown in SEQ ID NOs: 1329-1344. Exemplary nucleotide sequences encoding the RIPK3 protein of SEQ ID NO: 1339 is shown in SEQ ID NOs: 1415 and 1486. The ORF amino acid sequences of the GSDMD constructs without any epitope tag are shown in SEQ ID NOs: 1367-1372. Exemplary 5′ UTRs for use in the constructs are shown in SEQ ID NOs: 21 and 1323. An exemplary 3′ UTR for use in the constructs is shown in SEQ ID NO: 22. An exemplary 3′ UTR comprising miR-122 and miR-142-3p binding sites for use in the constructs is shown in SEQ ID NO: 23.

[1659] To determine wither the RIPK3 or GSDMD constructs could induce cell death, the constructs were transfected into three different cells types: HeLa cells, B16F10 cells and MC38 cells. Five thousand cells/well were plated in 96 well plates and the mmRNA constructs were transfected into them using Lipofectamine 2000. After 24 hours, cell death was measured using the CellTiter-Glo® Luminescent Cell Viability Assay (Promega). The results are shown in FIG. 59A (HeLa cells), FIG. 59B (B16F10 cells) and FIG. 59C (MC38 cells), with data for the MLKL (1-180) construct also shown for comparison purposes. The results demonstrate that the RIPK3 mmRNA constructs were capable of inducing cell death in all three cell types with a potency comparable to that observed for the MLKL (1-180) construct. The results further demonstrate that the GSDMD construct also was capable of inducing cell death in all three cell types, albeit with a lesser potency than that observed for the MLKL (1-180) construct. Similar results were observed for experiments conducted with the YOYO-3® read-out system.

[1660] A series of additional RIPK3 constructs were made that were designed to oligomerize. These constructs contain protein domains (IZ trimer, or leucine zipper chiral domains (EE and RR)), which lead to trimerization and oligomerization of proteins. Induced dimer or trimer formation of RIPK3 leads to higher molecular weight oligomers and induction of necroptosis (see Yatim et al., Science, 2015 and Orozco et al, Cell Death Differ, 2014 for reference). These constructs were tested for their ability to induce cell death by transfection into NIH3T3 cells. Cell death was measured using the YOYO-3® read-out system at 15 hours post-transfection. The results are shown in FIG. 60 and Table 24, which demonstrates that the multimerizing RIPK3 constructs induce death of the NIH3T3 cells.

TABLE 24

| | Dimerize with B/B | |
|---|---|---|
| Protein | homodimerizer | Binds to RIPK1 |
| ΔN-Fv-Caspase-8.nFLG | Yes | No |
| muRIPK3ΔC-2xSGTA.DM.cV5 | No | No |
| ΔN-SGTA.DM-Caspase-8.nFlg | No | No |
| muRIPK3ΔC-2xSrc.DM.cV5 | No | No |
| ΔN-Src.DM-Caspase-8.nFlg | No | No |
| huRIPK3.del.C-2xFv.cV5 | Yes | No |
| muRIPK3-2xFV.cV5 | Yes | Yes |
| muRIPK3-IZ.Trimer | No | Yes |

[1661] The ability of the multimerizing RIPK3 constructs to induce DAMP release was examined as an indicator of induction of necroptosis by the constructs. B16F10 cells were transfected with either a multimerizing RIPK3 construct (RIPK3-IZ trimer), an apoptosis-inducing construct (PUMA), an MLKL 1-180 construct (huMLKL.4HB(1-180).cHA miR122/142-3p) shown in Example 23 to induce DAMP release or a GFP control construct. Release of HMGB1 was detected using an HMGB1 ELISA assay. The results are shown in FIG. 61, which demonstrates that the multimerizing RIPK3 construct induced the release of HMGB1 at similar levels to the MLKL construct.

[1662] Another series of experiments examined the effect of the inhibitor GSK′872 on RIPK3-induced cell death. GSK′872 is an inhibitor that specifically targets RIPK3. GSK′872 was shown to inhibit cell death in a concentration dependent manner (measured using YOYO-3® as the read-out; data not shown) induced by RIPK3 constructs, thereby confirming that the observed cell death was necroptotic cell death induced by RIPK3.

### Example 25: DIABLO mmRNA Constructs Induce Cell Death

[1663] In this example, a series of mmRNA constructs that encoded DIABLO were made and tested for their ability to induce cell death. These constructs typically also encoded an epitope tag at either the N-terminus or C-terminus to facilitate detection. Different epitope tags were tested (FLAG, Myc, CT, HA, V5). Additionally, all constructs contained a Cap 1 5′ Cap (7mG(5′)ppp(5′)NlmpNp), 5′ UTR, 3′ UTR, a poly A tail of 100 nucleotides and were fully modified with 1-methyl-pseudouridine (m1ψ). The ORF amino acid sequences of the DIABLO constructs without any epitope tag are shown in SEQ ID NOs: 165-172. Exemplary nucleotide sequences encoding the DIABLO protein of SEQ ID NO: 169 are shown in SEQ ID NOs: 1416 and 1487. Exemplary 5′ UTRs for use in the constructs are shown in SEQ ID NOs: 21 and 1323. An exemplary 3′ UTR for use in the constructs is shown in SEQ ID NO: 22. An exemplary 3′ UTR comprising miR-122 and miR-142-3p binding sites for use in the constructs is shown in SEQ ID NO: 23.

[1664] To determine wither the DIABLO constructs could induce cell death, the constructs were transfected into SKOV3 cells. Ten thousand cells/well were plated in 96 well plates and the mmRNA constructs were transfected into them using Lipofectamine 2000. After 41 hours, cell death was measured using the CellTiter-Glo® Luminescent Cell Viability Assay (Promega). The results are shown in FIG. 62, which demonstrate that a number of the DIABLO mmRNA constructs were capable of inducing cell death.

### Example 26: Caspase 4, Caspase-5, Caspase-11, Pyrin, NLRP3 and ASC mmRNA Constructs Induce Cell Death

[1665] In this example, mmRNA constructs encoding various forms of caspase-4, caspase-5, caspase-11, Pyrin, NLRP3 or ASC were prepared and transfected into cells to examine their ability to induce cell death using the YOYO-3® DNA dye (Life Technologies) to measure the extent of cell death.

[1666] In a first series of experiments, a panel of mmRNA constructs that encoded various caspase-4, -5 or -11 proteins were made and tested for their ability to induce cell death. Constructs tested encoded either (i) full-length wild-type caspase-4, caspase-5 or caspase-11; (ii) full-length caspase-4, -5 or -11 plus an IZ domain; (iii)N-terminally deleted caspase-4, -5 or -11 plus an IZ domain; (iv) full-length caspase-4, -5 or -11 plus a DM domain; or (v)N-terminally deleted caspase-4, -5 or -11 plus a DM domain. The N-terminally deleted forms of caspase-4 and caspase-11 contained amino acid residues 81-377, whereas the N-terminally deleted form of caspase-5 contained amino acid residues 137-434. These constructs typically also encoded an epitope tag (e.g., FLAG, Myc, CT, HA, V5) at either the N-terminus or C-terminus to facilitate detection. Additionally, all constructs contained a Cap 1 5′ Cap (7mG(5′)ppp(5′)NlmpNp), a 5′ UTR, a 3′ UTR, a poly A tail of 100 nucleotides and were fully modified with 1-methyl-pseudouridine (m1ψ). The ORF amino acid sequences of the caspase-4 constructs without any epitope tag are shown in SEQ ID NOs: 1352-1356. The ORF amino acid sequences of the caspase-5 constructs without any epitope tag are shown in SEQ ID NOs: 1357-1361. The ORF amino acid sequences of the caspase-11 constructs without any epitope tag are shown in SEQ ID NOs: 1362-1366. Exemplary 5′ UTRs for use in the constructs are shown in SEQ ID NOs: 21 and 1323. An exemplary 3′ UTR for use in the constructs is shown in SEQ ID NO: 22. An exemplary 3′ UTR comprising miR-122 and miR-142-3p binding sites for use in the constructs is shown in SEQ ID NO: 23.

[1667] To determine whether the caspase-4, -5 and -11 constructs could induce cell death, the constructs were transfected into HeLa cells using Lipofectamine 2000. After 24 hours, cell death was measured using the YOYO-3® DNA dye. The results are shown in FIG. 63, which demonstrates that all five forms of the caspase-4, caspase-5 and caspase-11 mmRNA constructs were capable of inducing cell death of the HeLa cells.

[1668] In a second series of experiments, a panel of mmRNA constructs that encoded various Pyrin, NLRP3 or ASC proteins were made and tested for their ability to induce cell death. These constructs typically also encoded an epitope tag (e.g., FLAG, Myc, CT, HA, V5) at either the N-terminus or C-terminus to facilitate detection. Additionally, all constructs contained a Cap 1 5′ Cap (7mG(5′)ppp(5′)NlmpNp), a 5′ UTR, a 3′ UTR, a poly A tail of 100 nucleotides and were fully modified with 1-methyl-pseudouridine (m1ψ). The ORF amino acid sequences of the Pyrin constructs without any epitope tag are shown in SEQ ID NOs: 1375 and 1376. The ORF amino acid sequences of the NLRP3 constructs without any epitope tag are shown in SEQ ID NOs: 1373 and 1374. The ORF amino acid sequences of the ASC constructs without any epitope tag are shown in SEQ ID NOs: 1377 and 1378. Exemplary 5′ UTRs for use in the constructs are shown in SEQ ID NOs: 21 and 1323. An exemplary 3′ UTR for use in the constructs is shown in SEQ ID NO: 22. An exemplary 3′ UTR comprising miR-122 and miR-142-3p binding sites for use in the constructs is shown in SEQ ID NO: 23.

[1669] To determine whether the Pyrin, NLRP3 and ASC constructs could induce cell death, the constructs were transfected into HeLa cells using Lipofectamine 2000. After 24 hours, cell death was measured using the YOYO-3® DNA dye. The results are shown in FIG. 64, which demonstrates that the Pyring, NLRP3 and ASC mmRNA constructs were capable of inducing cell death of the HeLa cells.

### Example 27: Constitutively Active IRF3 and IRF7 mmRNA Constructs Activate an Interferon-Sensitive Response Element (ISRE)

[1670] In this example, a reporter gene whose transcription was driven by an interferon-sensitive response element (ISRE) was used to test the ability of constitutively active IRF3 and IRF7 mRNA constructs to activate the ISRE. Constitutively active IRF3 and IRF7 constructs were prepared and are described below. These constructs typically also encoded an epitope tag at either the N-terminus or C-terminus to facilitate detection. Different epitope tags were tested (FLAG, Myc, CT, HA, V5). Additionally, all constructs contained a Cap 1 5′ Cap (7mG(5′)ppp(5′)NlmpNp), 5′ UTR, 3′ UTR, a poly A tail of 100 nucleotides and were fully modified with 1-methyl-pseudouridine (m1ψ). The ORF amino acid sequences of representative constitutively active mouse and human IRF3 constructs, comprising a S396D point mutation, without any epitope tag are shown in SEQ ID NOs: 11 and 12, respectively. Exemplary nucleotide sequences encoding these IRF3 proteins are shown in SEQ ID NOs: 210 and 211, respectively, and SEQ ID NOs: 1452 and 1453, respectively. The ORF amino acid sequences of representative constitutively active human IRF7 constructs without any epitope tag are shown in SEQ ID NOs: 13-20. Exemplary nucleotide sequences encoding these IRF7 proteins are shown in SEQ ID NOs: 212-219, respectively and SEQ ID NOs: 1454-1461. Exemplary 5′ UTRs for use in the constructs are shown in SEQ ID NOs: 21 and 1323. An exemplary 3′ UTR for use in the constructs is shown in SEQ ID NO: 22. An exemplary 3′ UTR comprising miR-122 and miR-142-3p binding sites for use in the constructs is shown in SEQ ID NO: 23.

[1671] The results are shown in FIG. 65A-B, which demonstrate that the constitutively active IRF3 constructs (FIG. 65A) and the constitutively active IRF7 constructs (FIG. 65B) both stimulated reporter gene expression, thereby indicating that the constructs were capable of activating the interferon-sensitive response element (ISRE).

### Example 28: Effect of Priming on Release of Inflammatory Cytokines by Cells Treated with Pyroptotic Constructs

[1672] In this example, the effect of priming cells with an immune potentiator agent before transfection with a pyroptotic mRNA construct on release of proinflammatory cytokines by the cells was examined.

[1673] The design of the study is illustrated in FIG. 66. On Day 1, 10,000 HeLa cells/well were plated in 96 well plates. On Day 2, the cells were treated with one of the immune potentiator agents shown in FIG. 66 (the constitutively active IKKβ constructs are described further in Example 3). On Day 3, the cells were transfected with one of the caspase-4, caspase-5 or caspase-11 mRNA constructs shown in FIG. 66 (the caspase-4, -5 and -11 constructs are described further in Example 26). On Day 4, supernatants were collected and assayed for levels of the inflammatory cytokine IL-18 by standard ELISA.

[1674] The results are shown in FIG. 67, which demonstrates that priming of the cells in particular with the immune potentiators IL-1α or the constitutively active IKKβ construct with PEST mutation stimulated release of proinflammatory cytokines by the HeLa cells, in particular those treated with the caspase-4 or caspase-5 constructs. These results demonstrate the benefit of combining an immune potentiator with an mRNA construct encoding a polypeptide that stimulates immunogenic cell death in order to enhance a proinflammatory response.

### Example 29: Anti-Tumor Effects of Executioner mRNAs, Alone or in Combination with an Immune Potentiator and/or Immune Checkpoint Inhibitor

[1675] In this example, the effect of executioner mRNAs on tumor growth in vivo in mice was examined. Executioner mRNA constructs encoding MLKL, RIPK3 or DIABLO were used alone or in combination, as well as in combination with an immune potentiator (STING mRNA construct) and/or an immune checkpoint inhibitor (anti-CTLA4 antibody or anti-PD-1 antibody).

[1676] In a first set of experiments, mice carrying MC38 colon carcinoma tumors (5×10⁵ cells implanted subcutaneously; tumors ˜100-120 mm³ in size at time of treatment) were divided into eleven treatment groups and treated intratumorally with the following mRNA constructs biweekly for 4 weeks (days 1, 4, 8, 11, 17, 20, 24 and 27), with certain groups also being treated with an immune checkpoint inhibitor(s) as indicated: (i) NT-MOD as a negative control; (ii) huMLKL.4HB(1-180).cHA miR122/142-3p (12.5 μg/animal); (iii) DIABLO (12.5 μg/animal); (iv) muRIPK3-IZ.Trimer (12.5 μg/animal); (v) huMLKL.4HB(1-180) cHA miR122/142-3p (12.5 μg/animal)+anti-CTLA4 9H10 (5 mg/kg, intraperitoneally on day 1, 2.5 mg/kg intraperitoneally on days 4 and 7); (vi) DIABLO (12.5 μg/animal)+anti-CTLA4 9H10 (5 mg/kg, intraperitoneally on day 1, 2.5 mg/kg intraperitoneally on days 4 and 7); (vii) muRIPK3-IZ.Trimer (12.5 μg/animal)+anti-CTLA4 9H10 (5 mg/kg, intraperitoneally on day 1, 2.5 mg/kg intraperitoneally on days 4 and 7); (viii) NT-MOD+anti-CTLA4 9H10 (5 mg/kg, intraperitoneally on day 1, 2.5 mg/kg intraperitoneally on days 4 and 7); (ix) huMLKL.4HB(1-180).cHA miR122/142-3p (12.5 μg/animal)+DIABLO (12.5 μg/animal); (x) huMLKL.4HB(1-180).cHA miR122/142-3p (12.5 μg/animal)+DIABLO (12.5 μg/animal)+anti-CTLA4 9H10 (5 mg/kg, intraperitoneally on day 1, 2.5 mg/kg intraperitoneally on days 4 and 7); and (xi) anti-CTLA4 9H10 (5 mg/kg, intraperitoneally on day 1, 2.5 mg/kg intraperitoneally on days 4 and 7)+anti-PD-1 RMP1-14 (5 mg/kg intraperitoneally biweekly for two weeks) as a positive control.

[1677] The results are shown in FIGS. 68A-68K, corresponding to the eleven treatment groups described above, showing tumor volume (mm³) in the mice over the time course of the experiment. Additionally, serum was collected at 10 hours and 24 hours after the first intratumoral injection and analyzed for expression of inflammatory cytokines using ProcataPlex (Affymetrix). The cytokine analysis revealed that levels of IFN-α, IL-6, TNF-α, GRO α (CXCL1), MIP-1 α (CCL3), MIP-1β (CCL4) and RANTES (CCL5) were elevated in the treatment groups as compared to the controls.

[1678] In a second set of experiments, mice carrying MC38 colon carcinoma tumors (5×10⁵ cells implanted subcutaneously; tumors ˜100-120 mm³ in size at time of treatment) were divided into seven treatment groups and treated intratumorally with the following mRNA constructs weekly for 4 weeks (days 1, 8, 15, 22): (i) NT-MOD as a negative control; (ii) NT-MOD+STING; (iii) MLKL+STING; (iv) Diablo+STING; (v) RIPK3+STING; (vi) MLKL+Diablo+STING; and (vii) RIPK3+Diablo+STING. All groups were treated with anti-CTLA4 (intraperitoneally) at 5 mg/kg on day 1, and at 2.5 mg/kg on day 4 and 7.

[1679] The results are shown in FIG. 69A, corresponding to the seven treatment groups described above, showing tumor volume (mm³) in the mice over the time course of the experiment, and in FIG. 69B, showing percent survival of the indicated treatment groups over the course of the experiment. Additionally, serum was collected at 10 hours and 24 hours after the first intratumoral injection and analyzed for expression of inflammatory cytokines using ProcataPlex (Affymetrix). The cytokine analysis revealed that levels of IFN-α, IL-6, TNF-α, GRO α (CXCL1), MIP-1 α (CCL3), MIP-1β (CCL4) and RANTES (CCL5) were elevated in the treatment groups as compared to the controls.

[1680] In a third set of experiments, mice carrying MC38 colon carcinoma tumors (5×10⁵ cells implanted subcutaneously) were divided into three treatment groups and treated intratumorally with the following mRNA constructs weekly for 4 weeks (days 1, 8, 15, 22): (i) vehicle control; (ii) NT-MOD+anti-PD-1; (iii) STING+anti-PD-1. Anti-PD1 was given intraperitoneally at 5 mg/kg, biweekly for 2 weeks.

[1681] The results are shown in FIG. 70A, corresponding to the three treatment groups described above, showing tumor volume (mm³) in the mice over the time course of the experiment, and in FIG. 70B, showing percent survival of the treatment groups over the course of the experiment.

### Other Embodiments

[1682] It is to be understood that while the present disclosure has been described in conjunction with the detailed description thereof, the foregoing description is intended to illustrate and not limit the scope of the present disclosure, which is defined by the scope of the appended claims. Other aspects, advantages, and alterations are within the scope of the following claims.

[1683] All references described herein are incorporated by reference in their entireties.

SEQUENCE LISTING SUMMARY

| SEQ | |
|---|---|
| ID | |
| NO: | SEQUENCE |
| 1 | MPHSSLHPSIPCPRGHGAQKAALVLLSACLVTLWGLGEPPEHTLRYLVLHLASLQLGLLLNGVCSLAEELRHIHSRYRG |
| | SYWRTVRACLGCPLRRGALLLLSIYFYYSLPNAVGPPFTWMLALLGLSQALNILLGLKGLAPAEISAVCEKGNFNMAH |
| | GLAWSYYIGYLRLILPELQARIRTYNQHYNNLLRGAVSQRLYILLPLDCGVPDNLSMADPNIRFLDKLPQQTGDHAGI |
| | KDRVYSNSIYELLENGQRAGTCVLEYATPLQTLFAMSQYSQAGFSREDRLEQAKLFCRTLEDILADAPESQNNCRLIAY |
| | QEPADDSSFSLSQEVLRHLRQEEKEEVTVGSLKTSAVPSTSTMSQEPELLISGMEKPLPLRTDFS |
| | (huSTING(V155M); no epitope tag) |
| 2 | MPHSSLHPSIPCPRGHGAQKAALVLLSACLVTLWGLGEPPEHTLRYLVLHLASLQLGLLLNGVCSLAEELRHIHSRYRG |
| | SYWRTVRACLGCPLRRGALLLLSIYFYYSLPNAVGPPFTWMLALLGLSQALNILLGLKGLAPAEISAVCEKGNFNVAH |
| | GLAWSYYIGYLRLILPELQARIRTYNQHYNNLLRGAVSQRLYILLPLDCGVPDNLSMADPNIRFLDKLPQQTGDHAGI |
| | KDRVYSNSIYELLENGQRAGTCVLEYATPLQTLFAMSQYSQAGFSREDtLEQAKLFCRTLEDILADAPESQNNCRLIAY |
| | QEPADDSSFSLSQEVLRHLRQEEKEEVTVGSLKTSAVPSTSTMSQEPELLISGMEKPLPLRTDFS |
| | (Hu STING(R284T); no epitope tag) |
| 3 | MPHSSLHPSIPCPRGHGAQKAALVLLSACLVTLWGLGEPPEHTLRYLVLHLASLQLGLLLNGVCSLAEELRHIHSRYRG |
| | SYWRTVRACLGCPLRRGALLLLSIYFYYSLPNAVGPPFTWMLALLGLSQALNILLGLKGLAPAEISAVCEKGNFNVAH |
| | GLAWSYYIGYLRLILPELQARIRTYNQHYNNLLRGAVSQRLYILLPLDCGVPDNLSMADPNIRFLDKLPQQTGDHAGI |
| | KDRVYSNSIYELLENGQRAGTCVLEYATPLQTLFAMSQYSQAGFSREDmLEQAKLFCRTLEDILADAPESQNNCRLIA |
| | YQEPADDSSFSLSQEVLRHLRQEEKEEVTVGSLKTSAVPSTSTMSQEPELLISGMEKPLPLRTDFS |
| | (hu STING (R284M); no epitope tag) |
| 4 | MPHSSLHPSIPCPRGHGAQKAALVLLSACLVTLWGLGEPPEHTLRYLVLHLASLQLGLLLNGVCSLAEELRHIHSRYRG |
| | SYWRTVRACLGCPLRRGALLLLSIYFYYSLPNAVGPPFTWMLALLGLSQALNILLGLKGLAPAEISAVCEKGNFNVAH |
| | GLAWSYYIGYLRLILPELQARIRTYNQHYNNLLRGAVSQRLYILLPLDCGVPDNLSMADPNIRFLDKLPQQTGDHAGI |
| | KDRVYSNSIYELLENGQRAGTCVLEYATPLQTLFAMSQYSQAGFSREDkLEQAKLFCRTLEDILADAPESQNNCRLIAY |
| | QEPADDSSFSLSQEVLRHLRQEEKEEVTVGSLKTSAVPSTSTMSQEPELLISGMEKPLPLRTDFS |
| | (Hu STING (R284K); no epitope tag) |
| 5 | MPHSSLHPSIPCPRGHGAQKAALVLLSACLVTLWGLGEPPEHTLRYLVLHLASLQLGLLLNGVCSLAEELRHIHSRYRG |
| | SYWRTVRACLGCPLRRGALLLLSIYFYYSLPNAVGPPFTWMLALLGLSQALNILLGLKGLAPAEISAVCEKGNFsVAHG |
| | LAWSYYIGYLRLILPELQARIRTYNQHYNNLLRGAVSQRLYILLPLDCGVPDNLSMADPNIRFLDKLPQQTGDHAGIK |
| | DRVYSNSIYELLENGQRAGTCVLEYATPLQTLFAMSQYSQAGFSREDRLEQAKLFCRTLEDILADAPESQNNCRLIAY |
| | QEPADDSSFSLSQEVLRHLRQEEKEEVTVGSLKTSAVPSTSTMSQEPELLISGMEKPLPLRTDFS |
| | (Hu STING(N154S); no epitope tag) |
| 6 | MPHSSLHPSIPCPRGHGAQKAALVLLSACLVTLWGLGEPPEHTLRYLVLHLASLQLGLLLNGVCSLAEELRHIHSRYRG |
| | SYWRTVRACLGCPLRRGALLLLSIYFYYSLPNAVGPPFTWMLALLGLSQALNILLGLKGLAPAEISAICEKGNFNVAHG |
| | LAWSYYIGYLRLILPELQARIRTYNQHYNNLLRGAVSQRLYILLPLDCGVPDNLSMADPNIRFLDKLPQQTGDHAGIK |
| | DRVYSNSIYELLENGQRAGTCVLEYATPLQTLFAMSQYSQAGFSREDRLEQAKLFCRTLEDILADAPESQNNCRLIAY |
| | QEPADDSSFSLSQEVLRHLRQEEKEEVTVGSLKTSAVPSTSTMSQEPELLISGMEKPLPLRTDFS |
| | (Hu STING(V147L; no epitope tag) |
| 7 | MPHSSLHPSIPCPRGHGAQKAALVLLSACLVTLWGLGEPPEHTLRYLVLHLASLQLGLLLNGVCSLAEELRHIHSRYRG |
| | SYWRTVRACLGCPLRRGALLLLSIYFYYSLPNAVGPPFTWMLALLGLSQALNILLGLKGLAPAEISAVCEKGNFNVAH |
| | GLAWSYYIGYLRLILPELQARIRTYNQHYNNLLRGAVSQRLYILLPLDCGVPDNLSMADPNIRFLDKLPQQTGDHAGI |
| | KDRVYSNSIYELLENGQRAGTCVLEYATPLQTLFAMSQYSQAGFSREDRLEQAKLFCRTLEDILADAPESQNNCRLIAY |
| | QqPADDSSFSLSQEVLRHLRQEEKEEVTVGSLKTSAVPSTSTMSQEPELLISGMEKPLPLRTDFS |
| | (Hu STING (E315Q); no epitope tag) |
| 8 | MPHSSLHPSIPCPRGHGAQKAALVLLSACLVTLWGLGEPPEHTLRYLVLHLASLQLGLLLNGVCSLAEELRHIHSRYRG |
| | SYWRTVRACLGCPLRRGALLLLSIYFYYSLPNAVGPPFTWMLALLGLSQALNILLGLKGLAPAEISAVCEKGNFNVAH |
| | GLAWSYYIGYLRLILPELQARIRTYNQHYNNLLRGAVSQRLYILLPLDCGVPDNLSMADPNIRFLDKLPQQTGDHAGI |
| | KDRVYSNSIYELLENGQRAGTCVLEYATPLQTLFAMSQYSQAGFSREDRLEQAKLFCRTLEDILADAPESQNNCRLIAY |
| | QEPADDSSFSLSQEVLRHLRQEEKEEVTVGSLKTSAVPSTSTMSQEPELLISGMEKPLPLaTDFS |
| | (Hu STING (R375A); no epitope tag) |
| 9 | MPHSSLHPSIPCPRGHGAQKAALVLLSACLVTLWGLGEPPEHTLRYLVLHLASLQLGLLLNGVCSLAEELR |
| | HIHSRYRGSYWRTVRACLGCPLRRGALLLLSIYFYYSLPNAVGPPFTWMLALLGLSQALNILLGLKGLAPAE |
| | ISALCEKGNFSMAHGLAWSYYIGYLRLILPELQARIRTYNQHYNNLLRGAVSQRLYILLPLDCGVPDNLSM |
| | ADPNIRFLDKLPQQTGDHAGIKDRVYSNSIYELLENGQRAGTCVLEYATPLQTLFAMSQYSQAGFSREDR |
| | LEQAKLFCRTLEDILADAPESQNNCRLIAYQEPADDSSFSLSQEVLRHLRQEEKEEVTVGSLKTSAVPSTST |
| | MSQEPELLISGMEKPLPLRTDFS |
| | (Hu STING(V147L/N154S/V155M); no epitope tag) |
| 10 | MPHSSLHPSIPCPRGHGAQKAALVLLSACLVTLWGLGEPPEHTLRYLVLHLASLQLGLLLNGVCSLAEELR |
| | HIHSRYRGSYWRTVRACLGCPLRRGALLLLSIYFYYSLPNAVGPPFTWMLALLGLSQALNILLGLKGLAPAE |
| | ISALCEKGNFSMAHGLAWSYYIGYLRLILPELQARIRTYNQHYNNLLRGAVSQRLYILLPLDCGVPDNLSM |
| | ADPNIRFLDKLPQQTGDHAGIKDRVYSNSIYELLENGQRAGTCVLEYATPLQTLFAMSQYSQAGFSRED |
| | MLEQAKLFCRTLEDILADAPESQNNCRLIAYQEPADDSSFSLSQEVLRHLRQEEKEEVTVGSLKTSAVPSTS |
| | TMSQEPELLISGMEKPLPLRTDFS |
| | (Hu STING(R284M/V147L/N154S/V155M); no epitope tag) |
| 11 | METPKPRILPWLVSQLDLGQLEGVAWLDESRTRFRIPWKHGLRQDAQMADFGIFQAWAEASGAYTPGKDKPDVS |
| | TWKRNFRSALNRKEVLRLAADNSKDPYDPHKVYEFVTPGARDFVHLGASPDTNGKSSLPHSQENLPKLFDGLILGPL |
| | KDEGSSDLAIVSDPSQQLPSPNVNNFLNPAPQENPLKQLLAEEQWEFEVTAFYRGRQVFQQTLFCPGGLRLVGSTA |
| | DMTLPWQPVTLPDPEGFLTDKLVKEYVGQVLKGLGNGLALWQAGQCLWAQRLGHSHAFWALGEELLPDSGRGP |
| | DGEVHKDKDGAVFDLRPFVADLIAFMEGSGHSPRYTLWFCMGEMWPQDQPWVKRLVMVKVVPTCLKELLEMA |
| | REGGASSLKTVDLHIDNSQPISLTSDQYKAYLQDLVEDMDFQATGNI |
| | (super mouse IRF3 S396D; no epitope tag) |
| 12 | MGTPKPRILPWLVSQLDLGQLEGVAWVNKSRTRFRIPWKHGLRQDAQQEDFGIFQAWAEATGAYVPGRDKPDLP |
| | TWKRNFRSALNRKEGLRLAEDRSKDPHDPHKIYEFVNSGVGDFSQPDTSPDTNGGGSTSDTQEDILDELLGNMVLA |
| | PLPDPGPPSLAVAPEPCPQPLRSPSLDNPTPFPNLGPSENPLKRLLVPGEEWEFEVTAFYRGRQVFQQTISCPEGLRL |
| | VGSEVGDRTLPGWPVTLPDPGMSLTDRGVMSYVRHVLSCLGGGLALWRAGQWLWAQRLGHCHTYWAVSEELL |
| | PNSGHGPDGEVPKDKEGGVFDLGPFIVDLITFTEGSGRSPRYALWFCVGESWPQDQPWTKRLVMVKVVPTCLRAL |
| | VEMARVGGASSLENTVDLHIDNSHPLSLTSDQYKAYLQDLVEGMDFQGPGET |
| | (super human IRF3 S396D; no epitope tag) |
| 13 | MALAPERAAPRVLFGEWLLGEISSGCYEGLQWLDEARTCFRVPWKHFARKDLSEADARIFKAWAVARGRWPPSSR |
| | GGGPPPEAETAERAGWKTNFRCALRSTRRFVMLRDNSGDPADPHKVYALSRELCWREGPGTDQTEAEAPAAVPP |
| | PQGGPPGPFLAHTHAGLQAPGPLPAPAGDKGDLLLQAVQQSCLADHLLTASWGADPVPTKAPGEGQEGLPLTGA |
| | CAGGPGLPAGELYGWAVETTPSPgpqpaalttgeaaapesphqaepylspspsactavqepspgaldvtimykgrtylqkyvghps |
| | ctflygppdpavratdpqqvafpspaelpdqkqlryteellrhvapglhlelrgpqlwarrmgkckvywevggppgsaspstpacllprncdt |
| | pifdfrvffqelvefrarqrrgsprytiylgfgqdlsagrpkekslvlvklepwlcrvhlegtqrEGVSSLDSSSLSLCLSSANSLYDDIECFLM |
| | ELEQPA |
| | (Wild-type Hu IRF7 isoform A; P037 without epitope tag) |
| 14 | MALAPERAAPRVLFGEWLLGEISSGCYEGLQWLDEARTCFRVPWKHFARKDLSEADARIFKAWAVARGRWPPSSR |
| | GGGPPPEAETAERAGWKTNFRCALRSTRRFVMLRDNSGDPADPHKVYALSRELCWREGPGTDQTEAEAPAAVPP |
| | PQGGPPGPFLAHTHAGLQAPGPLPAPAGDKGDLLLQAVQQSCLADHLLTASWGADPVPTKAPGEGQEGLPLTGA |
| | CAGGPGLPAGELYGWAVETTPSPgpqpaalttgeaaapesphqaepylspspsactavqepspgaldvtimykgrtvlqkvvghps |
| | ctflygppdpavratdpqqvafpspaelpdqkqlryteellrhvapglhlelrgpqlwarrmgkckvywevggppgsaspstpacllprncdt |
| | pifdfrvffqelvefrarqrrgsprytiylgfgqdlsagrpkekslvlvklepwlcrvhlegtqrEGVSSLDSSdLdLCLSSANSLYDDIECFL |
| | MELEQPA |
| | (constitutively active Hu IRF7 S477D/S479D; P033 without epitope tag) |
| 15 | MALAPERAAPRVLFGEWLLGEISSGCYEGLQWLDEARTCFRVPWKHFARKDLSEADARIFKAWAVARGRWPPSSR |
| | GGGPPPEAETAERAGWKTNFRCALRSTRRFVMLRDNSGDPADPHKVYALSRELCWREGPGTDQTEAEAPAAVPP |
| | PQGGPPGPFLAHTHAGLQAPGPLPAPAGDKGDLLLQAVQQSCLADHLLTASWGADPVPTKAPGEGQEGLPLTGA |
| | CAGGPGLPAGELYGWAVETTPSPgpqpaalttgeaaapesphqaepylspspsactavqepspgaldvtimykgrtvlqkvvghps |
| | ctflygppdpavratdpqqvafpspaelpdqkqlryteellrhvapglhlelrgpqlwarrmgkckvywevggppgsaspstpacllprncdt |
| | pifdfrvffqelvefrarqrrgsprytiylgfgqdlsagrpkekslvlvklepwlcrvhlegtqrEGVSSLDdSdLSdCLSSANSLYDDIECFL |
| | MELEQPA |
| | (constitutively active Hu IRF7 S475D/S477D/L480D; P034 without epitope tag) |
| 16 | MALAPERAAPRVLFGEWLLGEISSGCYEGLQWLDEARTCFRVPWKHFARKDLSEADARIFKAWAVARGRWPPSSR |
| | GGGPPPEAETAERAGWKTNFRCALRSTRRFVMLRDNSGDPADPHKVYALSRELCWREGPGTDQTEAEAPAAVPP |
| | PQGGPPGPFLAHTHAGLQAPGPLPAPAGDKGDLLLQAVQQSCLADHLLTASWGADPVPTKAPGEGQEGLPLTGA |
| | CAGGPGLPAGELYGWAVETTPSPgpqpaalttgeaaapesphqaepylspspsactavqepspgaldvtimykgrtvlqkvvghps |
| | ctflygppdpavratdpqqvafpspaelpdqkqlryteellrhvapglhlelrgpqlwarrmgkckvywevggppgsaspstpacllprncdt |
| | pifdfrvffqelvefrarqrrgsprytiylgfgqdlsagrpkekslvlvklepwlcrvhlegtqrEGVSSLDdddLdLCLdSANdLYDDIECFL |
| | MELEQPA |
| | (constitutively active Hu IRF7 S475D/S476D/S477D/S479D/S483D/S487D; P035 without epitope tag) |
| 17 | MALAPERAAPRVLFGEWLLGEISSGCYEGLQWLDEARTCFRVPWKHFARKDLSEADARIFKAWAVARGRWPPSSR |
| | GGGPPPEAETAERAGWKTNFRCALRSTRRFVMLRDNSGDPADPHKVYALSRELCWREGPGTDQTEAEAPAAVPP |
| | PQGGPPGPFLAHTHAGLQAPGPLPAPAGDKGDLLLQAVQQSCLADHLLTASWGADPVPTKAPGEGQEGLPLTGA |
| | CAGGPGLPAGELYGWAVETTPSPEGVSSLDSSSLSLCLSSANSLYDDIECFLMELEQPA |
| | (constitutively active truncated Hu IRF7 1-246 + 468-503; P032 without epitope tag) |
| 18 | MALAPERAAPRVLFGEWLLGEISSGCYEGLQWLDEARTCFRVPWKHFARKDLSEADARIFKAWAVARGRWPPSSR |
| | GGGPPPEAETAERAGWKTNFRCALRSTRRFVMLRDNSGDPADPHKVYALSRELCWREGPGTDQTEAEAPAAVPP |
| | PQGGPPGPFLAHTHAGLQAPGPLPAPAGDKGDLLLQAVQQSCLADHLLTASWGADPVPTKAPGEGQEGLPLTGA |
| | CAGGPGLPAGELYGWAVETTPSPEGVSSLDdddLdLCLdSANdLYDDIECFLMELEQPA |
| | (constitutively active truncated Hu IRF7 1-246 + 468-503 plus |
| | S475D/S476D/S477D/S479D/S483D/S487D; P036 without epitope tag) |
| 19 | MALAPERAAPRVLFGEWLLGEISSGCYEGLQWLDEARTCFRVPWKHFARKDLSEADARIFKAWAVARGRWPPSSR |
| | GGGPPPEAETAERAGWKTNFRCALRSTRRFVMLRDNSGDPADPHKVYALSRELCWREGPGTDQTEAEAPAAVPP |
| | PQgpqpaalttgeaaapesphqaepylspspsactavqepspgaldvtimykgrtvlqkvvghpsctflygppdpavratdpqqvafpspa |
| | elpdqkqlryteellrhvapglhlelrgpqlwarrmgkckvywevggppgsaspstpacllprncdtpifdfrvffqelvefrarqrrgspryt |
| | iylgfgqdlsagrpkekslylvklepwlcrvhlegtqrEGVSSLDSSSLSLCLSSANSLYDDIECFLMELEQPA |
| | (truncated Hu IRF7 1-151 + 247-503; P038 without epitope tag; null mutation) |
| 20 | MGGPPGPFLAHTHAGLQAPGPLPAPAGDKGDLLLQAVQQSCLADHLLTASWGADPVPTKAPGEGQEGLPLTGAC |
| | AGGPGLPAGELYGWAVETTPSPgpqpaalttgeaaapesphqaepylspspsactavqepspgaldvtimykgrtvlqkvvghpsct |
| | flygppdpavratdpqqvafpspaelpdqkqlryteellrhvapglhlelrgpqlwarrmgkckvywevggppgsaspstpacllprncdtpif |
| | dfrvffqelvefrarqrrgsprytiylgfgqdlsagrpkekslvlvklepwlcrvhlegtqrEGVSSLDSSSLSLCLSSANSLYDDIECFLMEL |
| | EQPA |
| | (truncated Hu IRF7 152-503; P039 without epitope tag; null mutation) |
| 21 | TCAAGCTTTTGGACCCTCGTACAGAAGCTAATACGACTCACTATAGGGAAATAAGAGAGAAAAGAAGAGTAAG |
| | AAGAAATATAAGAGCCACC |
| | (5′ UTR) |
| 22 | TGATAATAGGCTGGAGCCTCGGTGGCCATGCTTCTTGCCCCTTGGGCCTCCCCCCAGCCCCTCCTCCCCTTCCTG |
| | CACCCGTACCCCCGTGGTCTTTGAATAAAGTCTGAGTGGGCGGC |
| | (3′ UTR) |
| 23 | TGATAATAGGCTGGAGCCTCGGTGGCCATGCTTCTTGCCCCTTGGGCCCAAACACCATTGTCACACTCCATCCCC |
| | CCAGCCCCTCCTCCCCTTCCTCCATAAAGTAGGAAACACTACATGCACCCGTACCCCCGTGGTCTTTGAATAAAG |
| | TCTGAGTGGGCGGC |
| | (3′ UTR with miR-122 and miR-142-3p sites) |
| 24 | GSGATNFSLLKQAGDVEENPGP |
| | (2A peptide amino acid sequence) |
| 25 | GGAAGCGGAGCTACTAACTTCAGCCTGCTGAAGCAGGCTGGAGACGTGGAGGAGAACCCTGGACCT |
| | (Nucleotide sequence encoding 2A peptide) |
| 26 | TCCGGACTCAGATCCGGGGATCTCAAAATTGTCGCTCCTGTCAAACAAACTCTTAACTTTGATTTACTCAAACTG |
| | GCTGGGGATGTAGAAAGCAATCCAGGTCCACTC |
| | (Nucleotide sequence encoding 2A peptide) |
| 27 | GACAGUGCAGUCACCCAUAAAGUAGAAAGCACUACUAACAGCACUGGAGGGUGUAGUGUUUCCUACUUU |
| | AUGGAUGAGUGUACUGUG |
| | (miR-142) |
| 28 | UGUAGUGUUUCCUACUUUAUGGA |
| | (miR-142-3p) |
| 29 | UCCAUAAAGUAGGAAACACUACA |
| | (miR-142-3p binding site) |
| 30 | CAUAAAGUAGAAAGCACUACU |
| | (miR-142-5p) |
| 31 | AGUAGUGCUUUCUACUUUAUG |
| | (miR-142-5p binding site) |
| 32 | AACGCCAUUAUCACACUAAAUA |
| | (miR-122-3p) |
| 33 | UGGAGUGUGACAAUGGUGUUUG |
| | (miR-122-5p) |
| 34 | UAGCUUAUCAGACUGAUGUUGA |
| | (miR-21-5p) |
| 35 | CAACACCAGUCGAUGGGCUGU |
| | (miR-21-3p) |
| 36 | MHQKRTAMFQDPQER |
| | (HPV E6 peptide) |
| 37 | RTAMFQDPQERPRKL |
| | (HPV E6 peptide) |
| 38 | FQDPQERPRKLPQLC |
| | (HPV E6 peptide) |
| 39 | QERPRKLPQLCTELQ |
| | (HPV E6 peptide) |
| 40 | RKLPQLCTELQTTIH |
| | (HPV E6 peptide) |
| 41 | QLCTELQTTIHDIIL |
| | (HPV E6 peptide) |
| 42 | ELQTTIHDIILECVY |
| | (HPV E6 peptide) |
| 43 | LECVYCKQQLLRRII |
| | (HPV E6 peptide) |
| 44 | IILECVYCKQQLLRR |
| | (HPV E6 peptide) |
| 45 | CVYCKQQLLRREVYD |
| 46 | KQQLLRREVYDFAFR |
| | (HPV E6 peptide) |
| 47 | LRREVYDFAFRDLCI |
| | (HPV E6 peptide) |
| 48 | VYDFAFRDLCIVYRD |
| | (HPV E6 peptide) |
| 49 | AFRDLCIVYRDGNPY |
| | (HPV E6 peptide) |
| 50 | LCIVYRDGNPYAVCD |
| | (HPV E6 peptide) |
| 51 | YRDGNPYAVCDKCLK |
| | (HPV E6 peptide) |
| 52 | NPYAVCDKCLKFYSK |
| | (HPV E6 peptide) |
| 53 | VCDKCLKFYSKISEY |
| | (HPV E6 peptide) |
| 54 | CLKFYSKISEYRHYC |
| | (HPV E6 peptide) |
| 55 | YSKISEYRHYCYSLY |
| | (HPV E6 peptide) |
| 56 | SEYRHYCYSLYGTTL |
| | (HPV E6 peptide) |
| 57 | HYCYSLYGTTLEQQY |
| | (HPV E6 peptide) |
| 58 | SLYGTTLEQQYNKPL |
| | (HPV E6 peptide) |
| 59 | TTLEQQYNKPLCDLL |
| | (HPV E6 peptide) |
| 60 | QQYNKPLCDLLIRCI |
| | (HPV E6 peptide) |
| 61 | KPLCDLLIRCINCQK |
| | (HPV E6 peptide) |
| 62 | DLLIRCINCQKPLCP |
| | (HPV E6 peptide) |
| 63 | RCINCQKPLCPEEKQ |
| | (HPV E6 peptide) |
| 64 | CQKPLCPEEKQRHLD |
| | (HPV E6 peptide) |
| 65 | LCPEEKQRHLDKKQR |
| | (HPV E6 peptide) |
| 66 | EKQRHLDKKQRFHNI |
| | (HPV E6 peptide) |
| 67 | HLDKKQRFHNIRGRW |
| | (HPV E6 peptide) |
| 68 | KQRFHNIRGRWTGRC |
| | (HPV E6 peptide) |
| 69 | HNIRGRWTGRCMSCC |
| | (HPV E6 peptide) |
| 70 | GRWTGRCMSCCRSSR |
| | (HPV E6 peptide) |
| 71 | GRCMSCCRSSRTRRE |
| | (HPV E6 peptide) |
| 72 | SCCRSSRTRRETQL |
| | (HPV E6 peptide) |
| 73 | MHGDTPTLHEYMLDL |
| | (HPV E7 peptide) |
| 74 | TPTLHEYMLDLQPET |
| | (HPV E7 peptide) |
| 75 | HEYMLDLQPETTDLY |
| | (HPV E7 peptide) |
| 76 | LDLQPETTDLYCYEQ |
| | (HPV E7 peptide) |
| 77 | PETTDLYCYEQLNDS |
| | (HPV E7 peptide) |
| 78 | DLYCYEQLNDSSEEE |
| | (HPV E7 peptide) |
| 79 | YEQLNDSSEEEDEID |
| | (HPV E7 peptide) |
| 80 | NDSSEEEDEIDGPAG |
| | (HPV E7 peptide) |
| 81 | EEEDEIDGPAGQAEP |
| | (HPV E7 peptide) |
| 82 | EIDGPAGQAEPDRAH |
| | (HPV E7 peptide) |
| 83 | PAGQAEPDRAHYNIV |
| | (HPV E7 peptide) |
| 84 | AEPDRAHYNIVTFCC |
| | (HPV E7 peptide) |
| 85 | RAHYNIVTFCCKCDS |
| | (HPV E7 peptide) |
| 86 | NIVTFCCKCDSTLRL |
| | (HPV E7 peptide) |
| 87 | FCCKCDSTLRLCVQS |
| | (HPV E7 peptide) |
| 88 | CDSTLRLCVQSTHVD |
| | (HPV E7 peptide) |
| 89 | LRLCVQSTHVDIRTL |
| | (HPV E7 peptide) |
| 90 | VQSTHVDIRTLEDLL |
| | (HPV E7 peptide) |
| 91 | HVDIRTLEDLLMGTL |
| | (HPV E7 peptide) |
| 92 | RTLEDLLMGTLGIVC |
| | (HPV E7 peptide) |
| 93 | DLLMGTLGIVCPICS |
| | (HPV E7 peptide) |
| 94 | GTLGIVCPICSQKP |
| | (HPV E7 peptide) |
| 95 | MKLVVVGADGVGKSAL |
| | (KRAS(G12D)15 mer) |
| 96 | MKLVVVGAVGVGKSAL |
| | (KRAS(G12V)15 mer) |
| 97 | MLVVVGAGDVGKSALT |
| | (KRAS(G13D)15 mer) |
| 98 | MTEYKLVVVGADGVGKSALTIQLIQ |
| | (KRAS(G12D)25 mer) |
| 99 | MTEYKLVVVGAVGVGKSALTIQLIQ |
| | (KRAS(G12V)25 mer) |
| 100 | MTEYKLVVVGAGDVGKSALTIQLIQ |
| | (KRAS(G13D)25 mer) |
| 101 | MKLVVVGADGVGKSALKLVVVGADGVGKSALKLVVVGADGVGKSAL |
| | (KRAS(G12D)15 mer\hat{ }3) |
| 102 | MKLVVVGAVGVGKSALKLVVVGAVGVGKSALKLVVVGAVGVGKSAL |
| | (KRAS(G12V)15 mer\hat{ }3) |
| 103 | MLVVVGAGDVGKSALTLVVVGAGDVGKSALTLVVVGAGDVGKSALT |
| | (KRAS(G13D)15 mer\hat{ }3) |
| 104 | MTEYKLVVVGADGVGKSALTIQLIQMTEYKLVVVGADGVGKSALTIQLIQMTEYKLVVVGADGVGKSALTIQLIQ |
| | (KRAS(G12D)25 mer\hat{ }3) |
| 105 | MTEYKLVVVGAVGVGKSALTIQLIQMTEYKLVVVGAVGVGKSALTIQLIQMTEYKLVVVGAVGVGKSALTIQLIQ |
| | (KRAS(G12V)25 mer\hat{ }3) |
| 106 | MTEYKLVVVGAGDVGKSALTIQLIQMTEYKLVVVGAGDVGKSALTIQLIQMTEYKLVVVGAGDVGKSALTIQLIQ |
| | (KRAS(G13D)25 mer\hat{ }3) |
| 107 | MPHSSLHPSIPCPRGHGAQKAALVLLSACLVTLWGLGEPPEHTLRYLVLHLASLQLGLLLNGVCSLAEELRHIHSRYRG |
| | SYWRTVRACLGCPLRRGALLLLSIYFYYSLPNAVGPPFTWMLALLGLSQALNILLGLKGLAPAEISAVCEKGNFNMAH |
| | GLAWSYYIGYLRLILPELQARIRTYNQHYNNLLRGAVSQRLYILLPLDCGVPDNLSMADPNIRFLDKLPQQTGDHAGI |
| | KDRVYSNSIYELLENGQRAGTCVLEYATPLQTLFAMSQYSQAGFSREDRLEQAKLFCRTLEDILADAPESQNNCRLIA |
| | YQEPADDSSFSLSQEVLRHLRQEEKEEVTVGSLKTSAVPSTSTMSQEPELLISGMEKPLPLRTDFSATNFSLLKQAGDV |
| | EENPGPMKLVVVGADGVGKSAL |
| | (KRAS(G12D)15 mer_nt.STING(V155M)) |
| 108 | MPHSSLHPSIPCPRGHGAQKAALVLLSACLVTLWGLGEPPEHTLRYLVLHLASLQLGLLLNGVCSLAEELRHIHSRYRG |
| | SYWRTVRACLGCPLRRGALLLLSIYFYYSLPNAVGPPFTWMLALLGLSQALNILLGLKGLAPAEISAVCEKGNFNMAH |
| | GLAWSYYIGYLRLILPELQARIRTYNQHYNNLLRGAVSQRLYILLPLDCGVPDNLSMADPNIRFLDKLPQQTGDHAGI |
| | KDRVYSNSIYELLENGQRAGTCVLEYATPLQTLFAMSQYSQAGFSREDRLEQAKLFCRTLEDILADAPESQNNCRLIA |
| | YQEPADDSSFSLSQEVLRHLRQEEKEEVTVGSLKTSAVPSTSTMSQEPELLISGMEKPLPLRTDFSATNFSLLKQAGDV |
| | EENPGPMKLVVVGAVGVGKSAL |
| | (KRAS(G12V)15 mer_nt.STING(V155M) |
| 109 | MPHSSLHPSIPCPRGHGAQKAALVLLSACLVTLWGLGEPPEHTLRYLVLHLASLQLGLLLNGVCSLAEELRHIHSRYR |
| | GSYWRTVRACLGCPLRRGALLLLSIYFYYSLPNAVGPPFTWMLALLGLSQALNILLGLKGLAPAEISAVCEKGNFNM |
| | AHGLAWSYYIGYLRLILPELQARIRTYNQHYNNLLRGAVSQRLYILLPLDCGVPDNLSMADPNIRFLDKLPQQTGDH |
| | AGIKDRVYSNSIYELLENGQRAGTCVLEYATPLQTLFAMSQYSQAGFSREDRLEQAKLFCRTLEDILADAPESQNNC |
| | RLIAYQEPADDSSFSLSQEVLRHLRQEEKEEVTVGSLKTSAVPSTSTMSQEPELLISGMEKPLPLRTDFSATNFSLLKQ |
| | AGDVEENPGPMLVVVGAGDVGKSALT |
| | (KRAS(G13D)15 mer_nt.STING(V155M) |
| 110 | MPHSSLHPSIPCPRGHGAQKAALVLLSACLVTLWGLGEPPEHTLRYLVLHLASLQLGLLLNGVCSLAEELRHIHSRYR |
| | GSYWRTVRACLGCPLRRGALLLLSIYFYYSLPNAVGPPFTWMLALLGLSQALNILLGLKGLAPAEISAVCEKGNFNMA |
| | HGLAWSYYIGYLRLILPELQARIRTYNQHYNNLLRGAVSQRLYILLPLDCGVPDNLSMADPNIRFLDKLPQQTGDHA |
| | GIKDRVYSNSIYELLENGQRAGTCVLEYATPLQTLFAMSQYSQAGFSREDRLEQAKLFCRTLEDILADAPESQNNCRLI |
| | AYQEPADDSSFSLSQEVLRHLRQEEKEEVTVGSLKTSAVPSTSTMSQEPELLISGMEKPLPLRTDFSATNFSLLKQAGD |
| | VEENPGPMTEYKLVVVGADGVGKSALTIQLIQ |
| | (KRAS(G12D)25 mer_nt.STING(V155M)) |
| 111 | MPHSSLHPSIPCPRGHGAQKAALVLLSACLVTLWGLGEPPEHTLRYLVLHLASLQLGLLLNGVCSLAEELRHIHSRYR |
| | GSYWRTVRACLGCPLRRGALLLLSIYFYYSLPNAVGPPFTWMLALLGLSQALNILLGLKGLAPAEISAVCEKGNFNMA |
| | HGLAWSYYIGYLRLILPELQARIRTYNQHYNNLLRGAVSQRLYILLPLDCGVPDNLSMADPNIRFLDKLPQQTGDHA |
| | GIKDRVYSNSIYELLENGQRAGTCVLEYATPLQTLFAMSQYSQAGFSREDRLEQAKLFCRTLEDILADAPESQNNCRLI |
| | AYQEPADDSSFSLSQEVLRHLRQEEKEEVTVGSLKTSAVPSTSTMSQEPELLISGMEKPLPLRTDFSATNFSLLKQAGD |
| | VEENPGPMTEYKLVVVGAVGVGKSALTIQLIQ |
| | (KRAS(G12V)25 mer_nt.STING(V155m) |
| 112 | MPHSSLHPSIPCPRGHGAQKAALVLLSACLVTLWGLGEPPEHTLRYLVLHLASLQLGLLLNGVCSLAEELRHIHSRYR |
| | GSYWRTVRACLGCPLRRGALLLLSIYFYYSLPNAVGPPFTWMLALLGLSQALNILLGLKGLAPAEISAVCEKGNFNMA |
| | HGLAWSYYIGYLRLILPELQARIRTYNQHYNNLLRGAVSQRLYILLPLDCGVPDNLSMADPNIRFLDKLPQQTGDHA |
| | GIKDRVYSNSIYELLENGQRAGTCVLEYATPLQTLFAMSQYSQAGFSREDRLEQAKLFCRTLEDILADAPESQNNCRLI |
| | AYQEPADDSSFSLSQEVLRHLRQEEKEEVTVGSLKTSAVPSTSTMSQEPELLISGMEKPLPLRTDFSATNFSLLKQAGD |
| | VEENPGPMTEYKLVVVGAGDVGKSALTIQLIQ |
| | (KRAS(G13D)25 mer_nt.STING(V155M) |
| 113 | MPHSSLHPSIPCPRGHGAQKAALVLLSACLVTLWGLGEPPEHTLRYLVLHLASLQLGLLLNGVCSLAEELRHIHSRYRG |
| | SYWRTVRACLGCPLRRGALLLLSIYFYYSLPNAVGPPFTWMLALLGLSQALNILLGLKGLAPAEISAVCEKGNFNMAH |
| | GLAWSYYIGYLRLILPELQARIRTYNQHYNNLLRGAVSQRLYILLPLDCGVPDNLSMADPNIRFLDKLPQQTGDHAGI |
| | KDRVYSNSIYELLENGQRAGTCVLEYATPLQTLFAMSQYSQAGFSREDRLEQAKLFCRTLEDILADAPESQNNCRLIAY |
| | QEPADDSSFSLSQEVLRHLRQEEKEEVTVGSLKTSAVPSTSTMSQEPELLISGMEKPLPLRTDFSATNFSLLKQAGDVE |
| | ENPGPMKLVVVGADGVGKSALKLVVVGADGVGKSALKLVVVGADGVGKSAL |
| | (KRAS(G12D)15 mer\hat{ }3_nt.STING(V155M)) |
| 114 | MPHSSLHPSIPCPRGHGAQKAALVLLSACLVTLWGLGEPPEHTLRYLVLHLASLQLGLLLNGVCSLAEELRHIHSRYRG |
| | SYWRTVRACLGCPLRRGALLLLSIYFYYSLPNAVGPPFTWMLALLGLSQALNILLGLKGLAPAEISAVCEKGNFNMAH |
| | GLAWSYYIGYLRLILPELQARIRTYNQHYNNLLRGAVSQRLYILLPLDCGVPDNLSMADPNIRFLDKLPQQTGDHAGI |
| | KDRVYSNSIYELLENGQRAGTCVLEYATPLQTLFAMSQYSQAGFSREDRLEQAKLFCRTLEDILADAPESQNNCRLIAY |
| | QEPADDSSFSLSQEVLRHLRQEEKEEVTVGSLKTSAVPSTSTMSQEPELLISGMEKPLPLRTDFSATNFSLLKQAGDVE |
| | ENPGPMKLVVVGAVGVGKSALKLVVVGAVGVGKSALKLVVVGAVGVGKSAL |
| | (KRAS(G12V)15 mer\hat{ }3_nt.STING(V155M) |
| 115 | MPHSSLHPSIPCPRGHGAQKAALVLLSACLVTLWGLGEPPEHTLRYLVLHLASLQLGLLLNGVCSLAEELRHIHSRYRG |
| | SYWRTVRACLGCPLRRGALLLLSIYFYYSLPNAVGPPFTWMLALLGLSQALNILLGLKGLAPAEISAVCEKGNFNMAH |
| | GLAWSYYIGYLRLILPELQARIRTYNQHYNNLLRGAVSQRLYILLPLDCGVPDNLSMADPNIRFLDKLPQQTGDHAGI |
| | KDRVYSNSIYELLENGQRAGTCVLEYATPLQTLFAMSQYSQAGFSREDRLEQAKLFCRTLEDILADAPESQNNCRLIAY |
| | QEPADDSSFSLSQEVLRHLRQEEKEEVTVGSLKTSAVPSTSTMSQEPELLISGMEKPLPLRTDFSATNFSLLKQAGDVE |
| | ENPGPMLVVVGAGDVGKSALTLVVVGAGDVGKSALTLVVVGAGDVGKSALT |
| | (KRAS(G13D)15 mer\hat{ }3_nt.STING(V155M) |
| 116 | MPHSSLHPSIPCPRGHGAQKAALVLLSACLVTLWGLGEPPEHTLRYLVLHLASLQLGLLLNGVCSLAEELRHIHSRYRG |
| | SYWRTVRACLGCPLRRGALLLLSIYFYYSLPNAVGPPFTWMLALLGLSQALNILLGLKGLAPAEISAVCEKGNFNMAH |
| | GLAWSYYIGYLRLILPELQARIRTYNQHYNNLLRGAVSQRLYILLPLDCGVPDNLSMADPNIRFLDKLPQQTGDHAGI |
| | KDRVYSNSIYELLENGQRAGTCVLEYATPLQTLFAMSQYSQAGFSREDRLEQAKLFCRTLEDILADAPESQNNCRLIAY |
| | QEPADDSSFSLSQEVLRHLRQEEKEEVTVGSLKTSAVPSTSTMSQEPELLISGMEKPLPLRTDFSATNFSLLKQAGDVE |
| | ENPGPMTEYKLVVVGADGVGKSALTIQLIQMTEYKLVVVGADGVGKSALTIQLIQMTEYKLVVVGADGVGKSALTI |
| | QLIQ |
| | (KRAS(G12D)25 mer\hat{ }3_nt.STING(V155M)) |
| 117 | MPHSSLHPSIPCPRGHGAQKAALVLLSACLVTLWGLGEPPEHTLRYLVLHLASLQLGLLLNGVCSLAEELRHIHSRYRG |
| | SYWRTVRACLGCPLRRGALLLLSIYFYYSLPNAVGPPFTWMLALLGLSQALNILLGLKGLAPAEISAVCEKGNFNMAH |
| | GLAWSYYIGYLRLILPELQARIRTYNQHYNNLLRGAVSQRLYILLPLDCGVPDNLSMADPNIRFLDKLPQQTGDHAGI |
| | KDRVYSNSIYELLENGQRAGTCVLEYATPLQTLFAMSQYSQAGFSREDRLEQAKLFCRTLEDILADAPESQNNCRLIAY |
| | QEPADDSSFSLSQEVLRHLRQEEKEEVTVGSLKTSAVPSTSTMSQEPELLISGMEKPLPLRTDFSATNFSLLKQAGDVE |
| | ENPGPMTEYKLVVVGAVGVGKSALTIQLIQMTEYKLVVVGAVGVGKSALTIQLIQMTEYKLVVVGAVGVGKSALTIQ |
| | LIQ |
| | (KRAS(G12V)25 mer\hat{ }3_nt.STING(V155M) |
| 118 | MPHSSLHPSIPCPRGHGAQKAALVLLSACLVTLWGLGEPPEHTLRYLVLHLASLQLGLLLNGVCSLAEELRHIHSRYRG |
| | SYWRTVRACLGCPLRRGALLLLSIYFYYSLPNAVGPPFTWMLALLGLSQALNILLGLKGLAPAEISAVCEKGNFNMAH |
| | GLAWSYYIGYLRLILPELQARIRTYNQHYNNLLRGAVSQRLYILLPLDCGVPDNLSMADPNIRFLDKLPQQTGDHAGI |
| | KDRVYSNSIYELLENGQRAGTCVLEYATPLQTLFAMSQYSQAGFSREDRLEQAKLFCRTLEDILADAPESQNNCRLIAY |
| | QEPADDSSFSLSQEVLRHLRQEEKEEVTVGSLKTSAVPSTSTMSQEPELLISGMEKPLPLRTDFSATNFSLLKQAGDVE |
| | ENPGPMTEYKLVVVGAGDVGKSALTIQLIQMTEYKLVVVGAGDVGKSALTIQLIQMTEYKLVVVGAGDVGKSALTI |
| | QLIQ |
| | (KRAS(G13D)25 mer\hat{ }3_nt.STING(V155M) |
| 119 | MKLVVVGADGVGKSALATNFSLLKQAGDVEENPGPMPHSSLHPSIPCPRGHGAQKAALVLLSACLVTLWGLGEPP |
| | EHTLRYLVLHLASLQLGLLLNGVCSLAEELRHIHSRYRGSYWRTVRACLGCPLRRGALLLLSIYFYYSLPNAVGPPFTW |
| | MLALLGLSQALNILLGLKGLAPAEISAVCEKGNFNMAHGLAWSYYIGYLRLILPELQARIRTYNQHYNNLLRGAVSQR |
| | LYILLPLDCGVPDNLSMADPNIRFLDKLPQQTGDHAGIKDRVYSNSIYELLENGQRAGTCVLEYATPLQTLFAMSQYS |
| | QAGFSREDRLEQAKLFCRTLEDILADAPESQNNCRLIAYQEPADDSSFSLSQEVLRHLRQEEKEEVTVGSLKTSAVPST |
| | STMSQEPELLISGMEKPLPLRTDFS |
| | (KRAS(G12D)15 mer_ct.STING(V155M)) |
| 120 | MKLVVVGAVGVGKSALATNFSLLKQAGDVEENPGPMPHSSLHPSIPCPRGHGAQKAALVLLSACLVTLWGLGEPP |
| | EHTLRYLVLHLASLQLGLLLNGVCSLAEELRHIHSRYRGSYWRTVRACLGCPLRRGALLLLSIYFYYSLPNAVGPPFTW |
| | MLALLGLSQALNILLGLKGLAPAEISAVCEKGNFNMAHGLAWSYYIGYLRLILPELQARIRTYNQHYNNLLRGAVSQR |
| | LYILLPLDCGVPDNLSMADPNIRFLDKLPQQTGDHAGIKDRVYSNSIYELLENGQRAGTCVLEYATPLQTLFAMSQYS |
| | QAGFSREDRLEQAKLFCRTLEDILADAPESQNNCRLIAYQEPADDSSFSLSQEVLRHLRQEEKEEVTVGSLKTSAVPST |
| | STMSQEPELLISGMEKPLPLRTDFS |
| | (KRAS(G12V)15 mer_ct.STING(V155m) |
| 121 | MLVVVGAGDVGKSALTATNFSLLKQAGDVEENPGPMPHSSLHPSIPCPRGHGAQKAALVLLSACLVTLWGLGEPP |
| | EHTLRYLVLHLASLQLGLLLNGVCSLAEELRHIHSRYRGSYWRTVRACLGCPLRRGALLLLSIYFYYSLPNAVGPPFTW |
| | MLALLGLSQALNILLGLKGLAPAEISAVCEKGNFNMAHGLAWSYYIGYLRLILPELQARIRTYNQHYNNLLRGAVSQR |
| | LYILLPLDCGVPDNLSMADPNIRFLDKLPQQTGDHAGIKDRVYSNSIYELLENGQRAGTCVLEYATPLQTLFAMSQYS |
| | QAGFSREDRLEQAKLFCRTLEDILADAPESQNNCRLIAYQEPADDSSFSLSQEVLRHLRQEEKEEVTVGSLKTSAVPST |
| | STMSQEPELLISGMEKPLPLRTDFS |
| | (KRAS(G13D)15 mer_ct.STING(V155M) |
| 122 | MTEYKLVVVGADGVGKSALTIQLIQATNFSLLKQAGDVEENPGPMPHSSLHPSIPCPRGHGAQKAALVLLSACLVTL |
| | WGLGEPPEHTLRYLVLHLASLQLGLLLNGVCSLAEELRHIHSRYRGSYWRTVRACLGCPLRRGALLLLSIYFYYSLPNAV |
| | GPPFTWMLALLGLSQALNILLGLKGLAPAEISAVCEKGNFNMAHGLAWSYYIGYLRLILPELQARIRTYNQHYNNLLR |
| | GAVSQRLYILLPLDCGVPDNLSMADPNIRFLDKLPQQTGDHAGIKDRVYSNSIYELLENGQRAGTCVLEYATPLQTLF |
| | AMSQYSQAGFSREDRLEQAKLFCRTLEDILADAPESQNNCRLIAYQEPADDSSFSLSQEVLRHLRQEEKEEVTVGSLK |
| | TSAVPSTSTMSQEPELLISGMEKPLPLRTDFS |
| | (KRAS(G12D)25 mer_ct.STING(V155M)) |
| 123 | MTEYKLVVVGAVGVGKSALTIQLIQATNFSLLKQAGDVEENPGPMPHSSLHPSIPCPRGHGAQKAALVLLSACLVTL |
| | WGLGEPPEHTLRYLVLHLASLQLGLLLNGVCSLAEELRHIHSRYRGSYWRTVRACLGCPLRRGALLLLSIYFYYSLPNAV |
| | GPPFTWMLALLGLSQALNILLGLKGLAPAEISAVCEKGNFNMAHGLAWSYYIGYLRLILPELQARIRTYNQHYNNLLR |
| | GAVSQRLYILLPLDCGVPDNLSMADPNIRFLDKLPQQTGDHAGIKDRVYSNSIYELLENGQRAGTCVLEYATPLQTLF |
| | AMSQYSQAGFSREDRLEQAKLFCRTLEDILADAPESQNNCRLIAYQEPADDSSFSLSQEVLRHLRQEEKEEVTVGSLK |
| | TSAVPSTSTMSQEPELLISGMEKPLPLRTDFS |
| | (KRAS(G12V)25 mer_ct.STING(V155m) |
| 124 | MTEYKLVVVGAGDVGKSALTIQLIQATNFSLLKQAGDVEENPGPMPHSSLHPSIPCPRGHGAQKAALVLLSACLVTL |
| | WGLGEPPEHTLRYLVLHLASLQLGLLLNGVCSLAEELRHIHSRYRGSYWRTVRACLGCPLRRGALLLLSIYFYYSLPNAV |
| | GPPFTWMLALLGLSQALNILLGLKGLAPAEISAVCEKGNFNMAHGLAWSYYIGYLRLILPELQARIRTYNQHYNNLLR |
| | GAVSQRLYILLPLDCGVPDNLSMADPNIRFLDKLPQQTGDHAGIKDRVYSNSIYELLENGQRAGTCVLEYATPLQTLF |
| | AMSQYSQAGFSREDRLEQAKLFCRTLEDILADAPESQNNCRLIAYQEPADDSSFSLSQEVLRHLRQEEKEEVTVGSLK |
| | TSAVPSTSTMSQEPELLISGMEKPLPLRTDFS |
| | (KRAS(G13D)25 mer_ct.STING(V155m) |
| 125 | MKLVVVGADGVGKSALKLVVVGADGVGKSALKLVVVGADGVGKSALATNFSLLKQAGDVEENPGPMPHSSLHPSI |
| | PCPRGHGAQKAALVLLSACLVTLWGLGEPPEHTLRYLVLHLASLQLGLLLNGVCSLAEELRHIHSRYRGSYWRTVRAC |
| | LGCPLRRGALLLLSIYFYYSLPNAVGPPFTWMLALLGLSQALNILLGLKGLAPAEISAVCEKGNFNMAHGLAWSYYIGY |
| | LRLILPELQARIRTYNQHYNNLLRGAVSQRLYILLPLDCGVPDNLSMADPNIRFLDKLPQQTGDHAGIKDRVYSNSIYE |
| | LLENGQRAGTCVLEYATPLQTLFAMSQYSQAGFSREDRLEQAKLFCRTLEDILADAPESQNNCRLIAYQEPADDSSFS |
| | LSQEVLRHLRQEEKEEVTVGSLKTSAVPSTSTMSQEPELLISGMEKPLPLRTDFS |
| | (KRAS(G12D)15 mer\hat{ }3_ct.STING(V155M)) |
| 126 | MKLVVVGAVGVGKSALKLVVVGAVGVGKSALKLVVVGAVGVGKSALATNFSLLKQAGDVEENPGPMPHSSLHPSI |
| | PCPRGHGAQKAALVLLSACLVTLWGLGEPPEHTLRYLVLHLASLQLGLLLNGVCSLAEELRHIHSRYRGSYWRTVRAC |
| | LGCPLRRGALLLLSIYFYYSLPNAVGPPFTWMLALLGLSQALNILLGLKGLAPAEISAVCEKGNFNMAHGLAWSYYIGY |
| | LRLILPELQARIRTYNQHYNNLLRGAVSQRLYILLPLDCGVPDNLSMADPNIRFLDKLPQQTGDHAGIKDRVYSNSIYE |
| | LLENGQRAGTCVLEYATPLQTLFAMSQYSQAGFSREDRLEQAKLFCRTLEDILADAPESQNNCRLIAYQEPADDSSFS |
| | LSQEVLRHLRQEEKEEVTVGSLKTSAVPSTSTMSQEPELLISGMEKPLPLRTDFS |
| | (KRAS(G12V)15 mer\hat{ }3_ct.STING(V155M) |
| 127 | MLVVVGAGDVGKSALTLVVVGAGDVGKSALTLVVVGAGDVGKSALTATNFSLLKQAGDVEENPGPMPHSSLHPSI |
| | PCPRGHGAQKAALVLLSACLVTLWGLGEPPEHTLRYLVLHLASLQLGLLLNGVCSLAEELRHIHSRYRGSYWRTVRAC |
| | LGCPLRRGALLLLSIYFYYSLPNAVGPPFTWMLALLGLSQALNILLGLKGLAPAEISAVCEKGNFNMAHGLAWSYYIGY |
| | LRLILPELQARIRTYNQHYNNLLRGAVSQRLYILLPLDCGVPDNLSMADPNIRFLDKLPQQTGDHAGIKDRVYSNSIYE |
| | LLENGQRAGTCVLEYATPLQTLFAMSQYSQAGFSREDRLEQAKLFCRTLEDILADAPESQNNCRLIAYQEPADDSSFS |
| | LSQEVLRHLRQEEKEEVTVGSLKTSAVPSTSTMSQEPELLISGMEKPLPLRTDFS |
| | (KRAS(G13D)15 mer\hat{ }3_ct.STING(V155M) |
| 128 | MTEYKLVVVGADGVGKSALTIQLIQMTEYKLVVVGADGVGKSALTIQLIQMTEYKLVVVGADGVGKSALTIQLIQAT |
| | NFSLLKQAGDVEENPGPMPHSSLHPSIPCPRGHGAQKAALVLLSACLVTLWGLGEPPEHTLRYLVLHLASLQLGLLLN |
| | GVCSLAEELRHIHSRYRGSYWRTVRACLGCPLRRGALLLLSIYFYYSLPNAVGPPFTWMLALLGLSQALNILLGLKGLA |
| | PAEISAVCEKGNFNMAHGLAWSYYIGYLRLILPELQARIRTYNQHYNNLLRGAVSQRLYILLPLDCGVPDNLSMADP |
| | NIRFLDKLPQQTGDHAGIKDRVYSNSIYELLENGQRAGTCVLEYATPLQTLFAMSQYSQAGFSREDRLEQAKLFCRTL |
| | EDILADAPESQNNCRLIAYQEPADDSSFSLSQEVLRHLRQEEKEEVTVGSLKTSAVPSTSTMSQEPELLISGMEKPLPL |
| | RTDFS |
| | (KRAS(G12D)25 mer\hat{ }3_ct.STING(V155M)) |
| 129 | MTEYKLVVVGAVGVGKSALTIQLIQMTEYKLVVVGAVGVGKSALTIQLIQMTEYKLVVVGAVGVGKSALTIQLIQAT |
| | NFSLLKQAGDVEENPGPMPHSSLHPSIPCPRGHGAQKAALVLLSACLVTLWGLGEPPEHTLRYLVLHLASLQLGLLLN |
| | GVCSLAEELRHIHSRYRGSYWRTVRACLGCPLRRGALLLLSIYFYYSLPNAVGPPFTWMLALLGLSQALNILLGLKGLA |
| | PAEISAVCEKGNFNMAHGLAWSYYIGYLRLILPELQARIRTYNQHYNNLLRGAVSQRLYILLPLDCGVPDNLSMADP |
| | NIRFLDKLPQQTGDHAGIKDRVYSNSIYELLENGQRAGTCVLEYATPLQTLFAMSQYSQAGFSREDRLEQAKLFCRTL |
| | EDILADAPESQNNCRLIAYQEPADDSSFSLSQEVLRHLRQEEKEEVTVGSLKTSAVPSTSTMSQEPELLISGMEKPLPL |
| | RTDFS |
| | (KRAS(G12V)25 mer\hat{ }3_ct.STING(V155M) |
| 130 | MTEYKLVVVGAGDVGKSALTIQLIQMTEYKLVVVGAGDVGKSALTIQLIQMTEYKLVVVGAGDVGKSALTIQLIQAT |
| | NFSLLKQAGDVEENPGPMPHSSLHPSIPCPRGHGAQKAALVLLSACLVTLWGLGEPPEHTLRYLVLHLASLQLGLLLN |
| | GVCSLAEELRHIHSRYRGSYWRTVRACLGCPLRRGALLLLSIYFYYSLPNAVGPPFTWMLALLGLSQALNILLGLKGLA |
| | PAEISAVCEKGNFNMAHGLAWSYYIGYLRLILPELQARIRTYNQHYNNLLRGAVSQRLYILLPLDCGVPDNLSMADP |
| | NIRFLDKLPQQTGDHAGIKDRVYSNSIYELLENGQRAGTCVLEYATPLQTLFAMSQYSQAGFSREDRLEQAKLFCRTL |
| | EDILADAPESQNNCRLIAYQEPADDSSFSLSQEVLRHLRQEEKEEVTVGSLKTSAVPSTSTMSQEPELLISGMEKPLPL |
| | RTDFS |
| | (KRAS(G13D)25 mer\hat{ }3_ct.STING(V155M) |
| 131 | MTEYKLVVVGACGVGKSALTIQLIQ |
| | (KRAS(G12C)25 mer) |
| 132 | MTEYKLVVVGACGVGKSALTIQLIQMTEYKLVVVGACGVGKSALTIQLIQMTEYKLVVVGACGVGKSALTIQLIQ |
| | (KRAS(G12C)25 mer\hat{ }3) |
| 133 | MTEYKLVVVGAGGVGKSALTIQLIQ |
| | (KRAS(WT)25 mer) |
| 134 | MSAGDPRVGSGSLDSFMFSIPLVALNVGVRRRLSLFLNPRTPVAADWTLLAEEMGFEYLEIRELETRPDPTRSLLDA |
| | WQGRSGASVGRLLELLALLDREDILKELKSRIEEDCQKYLGKQQNQESEKPLQVARVESSVPQTKELGGITTLDDPLG |
| | QTPELFDAFICYCPNDIEFVQEMIRQLEQTDYRLKLCVSDRDVLPGTCVWSIASELIEKRCRRMVVVVSDDYLQSKEC |
| | DFQTKFALSLSPGVQQKRPIPIKYKAMKKDFPSILRFITICDYTNPCTKSWFWTRLAKALSLP |
| | (human myd88(L265P); P4027 without epitope tag) |
| 135 | MAAGGPGAGSAAPVSSTSSLPLAALNMRVRRRLSLFLNVRTQVAADWTALAEEMDFEYLEIRQLETQADPTGRLLD |
| | AWQGRPGASVGRLLELLTKLGRDDVLLELGPSIEEDCQKYILKQQQEEAEKPLQVAAVDSSVPRTAELAGITTLDDPL |
| | GHMPERFDAFICYCPSDIQFVQEMIRQLEQTNYRLKLCVSDRDVLPGTCVWSIASELIEKRCRRMVVVVSDDYLQSK |
| | ECDFQTKFALSLSPGAHQKRPIPIKYKAMKKEFPSILRFITVCDYTNPCTKSWFWTRLAKALSLP |
| | (mouse myd88(L265P); P4028 without epitope tag) |
| 136 | MGVGKSKLDKCPLSWHKKDSVDADQDGHESDSKNSEEACLRGFVEQSSGSEPPTGEQDQPEAKGAGPEEQDEEE |
| | FLKFVILHAEDDTDEALRVQDLLQNDFGIRPGIVFAEMPCGRLHLQNLDDAVNGSAWTILLLTENFLRDTWCNFQFY |
| | TSLMNSVSRQHKYNSVIPMRPLNSPLPRERTPLALQTINALEEESQGFSTQVERIFRESVFERQQSIWKETRSVSQKQ |
| | FIA |
| | (Mouse TRAM(TICAM2); P4033 without epitope tag) |
| 137 | MSLWGLVSKMPPEKVQRLYVDFPQHLRHLLGDWLESQPWEFLVGSDAFCCNLASALLSDTVQHLQASVGEQGEG |
| | STILQHISTLESIYQRDPLKLVATFRQILQGEKKAVMEQFRHLPMPFHWKQEELKFKTGLRRLQHRVGEIHLLREALQK |
| | GAEAGQVSLHSLIETPANGTGPSEALAMLLQETTGELEAAKALVLKRIQIWKRQQQLAGNGAPFEESLAPLQERCES |
| | LVDIYSQLQQEVGAAGGELEPKTRASLTGRLDEVLRTLVTSCFLVEKQPPQVLKTQTKFQAGVRFLLGLRFLGAPAKP |
| | PLVRADMVTEKQARELSVPQGPGAGAESTGEIINNTVPLENSIPGNCCSALFKNLLLKKIKRCERKGTESVTEEKCAVL |
| | FSASFTLGPGKLPIQLQALSLPLVVIVHGNQDNNAKATILWDNAFSEMDRVPFVVAERVPWEKMCETLNLKFMAEV |
| | GTNRGLLPEHFLFLAQKIFNDNSLSMEAFQHRSVSWSQFNKEILLGRGFTFWQWFDGVLDLTKRCLRSYWSDRLIIG |
| | FISKQYAASLLLNEPDGTFLLRFSDSEIGGITIAHVIRGQDGSPQIENIQPFSAKDLSIRSLGDRIRDLAQLKNLYPKKPKD |
| | EAFRSHYKPEQMGKDGRGYVPATIKMTVERDQPLPTPELQMPTMVPSYDLGMAPDSSMSMQLGPDMVPQVYP |
| | PHSHSIPPYQGLSPEESVNVLSAFQEPHLQMPPSLGQMSLPFDQPHPQGLLPCQPQEHAVSSPDPLLCSDVTMVED |
| | SCLSQPVTAFPQGTWIGEDIFPPLLPPTEQDLTKLLLEGQGESGGGSLGAQPLLQPSHYGQSGISMSHMDLRANPS |
| | W |
| | (STAT6 V547A/T548A); P008 with no epitope tag) |
| 138 | MSLWGLVSKMPPEKVQRLYVDFPQHLRHLLGDWLESQPWEFLVGSDAFCCNLASALLSDTVQHLQASVGEQGEG |
| | STILQHISTLESIYQRDPLKLVATFRQILQGEKKAVMEQFRHLPMPFHWKQEELKFKTGLRRLQHRVGEIHLLREALQK |
| | GAEAGQVSLHSLIETPANGTGPSEALAMLLQETTGELEAAKALVLKRIQIWKRQQQLAGNGAPFEESLAPLQERCES |
| | LVDIYSQLQQEVGAAGGELEPKTRASLTGRLDEVLRTLVTSCFLVEKQPPQVLKTQTKFQAGVRFLLGLRFLGAPAKP |
| | PLVRADMVTEKQARELSVPQGPGAGAESTGEIINNTVPLENSIPGNCCSALFKNLLLKKIKRCERKGTESVTEEKCAVL |
| | FSASFTLGPGKLPIQLQALDLPLVVIVHGNQDNNAKATILWDNAFSEMDRVPFVVAERVPWEKMCETLNLKFMAE |
| | VGTNRGLLPEHFLFLAQKIFNDNSLSMEAFQHRSVSWSQFNKEILLGRGFTFWQWFDGVLDLTKRCLRSYWSDRLII |
| | GFISKQYVTSLLLNEPDGTFLLRFSDSEIGGITIAHVIRGQDGSPQIENIQPFSAKDLSIRSLGDRIRDLAQLKNLYPKKPK |
| | DEAFRSHYKPEQMGKDGRGYVPATIKMTVERDQPLPTPELQMPTMVPSYDLGMAPDSSMSMQLGPDMVPQVY |
| | PPHSHSIPPYQGLSPEESVNVLSAFQEPHLQMPPSLGQMSLPFDQPHPQGLLPCQPQEHAVSSPDPLLCSDVTMVE |
| | DSCLSQPVTAFPQGTWIGEDIFPPLLPPTEQDLTKLLLEGQGESGGGSLGAQPLLQPSHYGQSGISMSHMDLRANPS |
| | W |
| | (STAT6 (S407D); P009 with no epitope tag) |
| 139 | MSLWGLVSKMPPEKVQRLYVDFPQHLRHLLGDWLESQPWEFLVGSDAFCCNLASALLSDTVQHLQASVGEQGEG |
| | STILQHISTLESIYQRDPLKLVATFRQILQGEKKAVMEQFRHLPMPFHWKQEELKFKTGLRRLQHRVGEIHLLREALQK |
| | GAEAGQVSLHSLIETPANGTGPSEALAMLLQETTGELEAAKALVLKRIQIWKRQQQLAGNGAPFEESLAPLQERCES |
| | LVDIYSQLQQEVGAAGGELEPKTRASLTGRLDEVLRTLVTSCFLVEKQPPQVLKTQTKFQAGVRFLLGLRFLGAPAKP |
| | PLVRADMVTEKQARELSVPQGPGAGAESTGEIINNTVPLENSIPGNCCSALFKNLLLKKIKRCERKGTESVTEEKCAVL |
| | FSASFTLGPGKLPIQLQALDLPLVVIVHGNQDNNAKATILWDNAFSEMDRVPFVVAERVPWEKMCETLNLKFMAE |
| | VGTNRGLLPEHFLFLAQKIFNDNSLSMEAFQHRSVSWSQFNKEILLGRGFTFWQWFDGVLDLTKRCLRSYWSDRLII |
| | GFISKQYAASLLLNEPDGTFLLRFSDSEIGGITIAHVIRGQDGSPQIENIQPFSAKDLSIRSLGDRIRDLAQLKNLYPKKPK |
| | DEAFRSHYKPEQMGKDGRGYVPATIKMTVERDQPLPTPELQMPTMVPSYDLGMAPDSSMSMQLGPDMVPQVY |
| | PPHSHSIPPYQGLSPEESVNVLSAFQEPHLQMPPSLGQMSLPFDQPHPQGLLPCQPQEHAVSSPDPLLCSDVTMVE |
| | DSCLSQPVTAFPQGTWIGEDIFPPLLPPTEQDLTKLLLEGQGESGGGSLGAQPLLQPSHYGQSGISMSHMDLRANPS |
| | W |
| | (STAT6 (S407D/V547A/T5484); P010 with no epitope tag) |
| 140 | MSLWGLVSKMPPEKVQRLYVDFPQHLRHLLGDWLESQPWEFLVGSDAFCCNLASALLSDTVQHLQASVGEQGEG |
| | STILQHISTLESIYQRDPLKLVATFRQILQGEKKAVMEQFRHLPMPFHWKQEELKFKTGLRRLQHRVGEIHLLREALQK |
| | GAEAGQVSLHSLIETPANGTGPSEALAMLLQETTGELEAAKALVLKRIQIWKRQQQLAGNGAPFEESLAPLQERCES |
| | LVDIYSQLQQEVGAAGGELEPKTRASLTGRLDEVLRTLVTSCFLVEKQPPQVLKTQTKFQAGVRFLLGLRFLGAPAKP |
| | PLVRADMVTEKQARELSVPQGPGAGAESTGEIINNTVPLENSIPGNCCSALFKNLLLKKIKRCERKGTESVTEEKCAVL |
| | FSASFTLGPGKLPIQLQALSLPLVVIVHGNQDNNAKATILWDNAFSEMDRVPFVVAERVPWEKMCETLNLKFMAEV |
| | GTNRGLLPEHFLFLAQKIFNDNSLSMEAFQHRSVSWSQFNKEILLGRGFTFWQWFDGVLDLTKRCLRSYWSDRLIIG |
| | FISKQYAASLLLNEPDGTFLLRFSDSEIGGITIAHVIRGQDGSPQIENIQPFSAKDLSIRSLGDRIRDLAQLKNLYPKKPKD |
| | EAFRSHYKPEQMGKDGRGFVPATIKMTVERDQPLPTPELQMPTMVPSYDLGMAPDSSMSMQLGPDMVPQVYP |
| | PHSHSIPPYQGLSPEESVNVLSAFQEPHLQMPPSLGQMSLPFDQPHPQGLLPCQPQEHAVSSPDPLLCSDVTMVED |
| | SCLSQPVTAFPQGTWIGEDIFPPLLPPTEQDLTKLLLEGQGESGGGSLGAQPLLQPSHYGQSGISMSHMDLRANPS |
| | W |
| | (STAT6 (V547A/T548A/Y641F); P011 with no epitope tag) |
| 141 | SAEVIHQVEEALDTDEKEMLLFLCRDVAIDVVPPNVRDLLDILRERGKLSVGDLAELLYRVRRFDLLKRILKMDRKAVE |
| | THLLRNPHLVSDYRVLMAEIGEDLDKSDVSSLIFLMKDYMGRGKISKEKSFLDLVVELEKLNLVAPDQLDLLEKCLKNI |
| | HRIDLKTKIQKYKQSVQGAGTSYRNVLQAAIQKSLKDPSNNFRLHNGRSKEQRLKEQLGAQQEPVKKSIQESEAFLP |
| | QSIPEERYKMKSKPLGICLIIDCIGNETELLRDTFTSLGYEVQKFLHLSMHGISQILGQFACMPEHRDYDSFVCVLVSRG |
| | GSQSVYGVDQTHSGLPLHHIRRMFMGDSCPYLAGKPKMFFIQNYVVSEGQLEDSSLLEVDGPAMKNVEFKAQKRG |
| | LCTVHREADFFWSLCTADMSLLEQSHSSPSLYLQCLSQKLRQERKRPLLDLHIELNGYMYDWNSRVSAKEKYYVWL |
| | QHTLRKKLILSYT |
| | (hu-cFLIP-L; P1006 without epitope tag) |
| 142 | SAEVIHQVEEALDTDEKEMLLFLCRDVAIDVVPPNVRDLLDILRERGKLSVGDLAELLYRVRRFDLLKRILKMDRKAVE |
| | THLLRNPHLVSDYRVLMAEIGEDLDKSDVSSLIFLMKDYMGRGKISKEKSFLDLVVELEKLNLVAPDQLDLLEKCLKNI |
| | HRIDLKTKIQKYKQSVQGAGTSYRNVLQAAIQKSLKDPSNNFRLHNGRSKEQRLKEQLGAQQEPVKKS |
| | (hu-cFLIP-S(1-227); P1007 without epitope tag) |
| 143 | SAEVIHQVEEALDTDEKEMLLFLCRDVAIDVVPPNVRDLLDILRERGKLSVGDLAELLYRVRRFDLLKRILKMDRKAVE |
| | THLLRNPHLVSDYRVLMAEIGEDLDKSDVSSLIFLMKDYMGRGKISKEKSFLDLVVELEKLNLVAPDQLDLLEKCLKNI |
| | HRIDLKTKIQKYKQSVQGAGTSYRNVLQAAIQKSLKD |
| | (hu-cFLIP-p22(1-198); P1008 without epitope tag) |
| 144 | SAEVIHQVEEALDTDEKEMLLFLCRDVAIDVVPPNVRDLLDILRERGKLSVGDLAELLYRVRRFDLLKRILKMDRKAVE |
| | THLLRNPHLVSDYRVLMAEIGEDLDKSDVSSLIFLMKDYMGRGKISKEKSFLDLVVELEKLNLVAPDQLDLLEKCLKNI |
| | HRIDLKTKIQKYKQSVQGAGTSYRNVLQAAIQKSLKDPSNNFRLHNGRSKEQRLKEQLGAQQEPVKKSIQESEAFLP |
| | QSIPEERYKMKSKPLGICLIIDCIGNETELLRDTFTSLGYEVQKFLHLSMHGISQILGQFACMPEHRDYDSFVCVLVSRG |
| | GSQSVYGVDQTHSGLPLHHIRRMFMGDSCPYLAGKPKMFFIQNYVVSEGQLEDSSLLEVD |
| | (hu-cFLIP-p43(1-376); P1009 without epitope tag) |
| 145 | GPAMKNVEFKAQKRGLCTVHREADFFWSLCTADMSLLEQSHSSPSLYLQCLSQKLRQERKRPLLDLHIELNGYMYD |
| | WNSRVSAKEKYYVWLQHTLRKKLILSYT |
| | (hu-cFLIP-p12(377-480); P1010 without epitope tag) |
| 146 | MSWSPSLTTQTCGAWEMKERLGTGGFGNVIRWHNQETGEQIAIKQCRQELSPRNRERWCLEIQIMRRLTH |
| | PNVVAARDVPEGMQNLAPNDLPLLAMEYCQGGDLRKYLNQFENCCGLREGAILTLLSDIASALRYLHEN |
| | RIIHRDLKPENIVLQQGEQRLIHKIIDLGYAKELDQGELCTEFVGTLQYLAPELLEQQKYTVTVDYWSFGTLAF |
| | ECITGFRPFLPNWQPVQWHSKVRQKSEVDIVVSEDLNGTVKFSSSLPYPNNLNSVLAERLEKWLQLMLM |
| | WHPRQRGTDPTYGPNGCFKALDDILNLKLVHILNMVTGTIHTYPVTEDESLQSLKARIQQDTGIPEEDQELL |
| | QEAGLALIPDKPATQCISDGKLNEGHTLDMDLVFLFDNSKITYETQISPRPQPESVSCILQEPKRNLAFFQLRK |
| | VWGQVWHSIQTLKEDCNRLQQGQRAAMMNLLRNNSCLSKMKNSMASMSQQLKAKLDFFKTSIQIDLEK |
| | YSEQTEFGITSDKLLLAWREMEQAVELCGRENEVKLLVERMMALQTDIVDLQRSPMGRKQGGTLDDLEEQ |
| | ARELYRRLREKPRDQRTEGDSQEMVRLLLQAIQSFEKKVRVIYTQLSKTVVCKQKALELLPKVEEVVSLMN |
| | EDEKTVVRLQEKRQKELWNLLKIACSKVRGPVSGSPDSMNASRLSQPGQLMSQPSTASNSLPEPAKKSEEL |
| | VAEAHNLCTLLENAIQDTVREQDQSFTALDWSWLQTEEEEHSCLEQAS |
| | (huIKK2ca(S177E/S181E); P4005 without epitope tag) |
| 147 | MSWSPSLTTQTCGAWEMKERLGTGGFGNVIRWHNQETGEQIAIKQCRQELSPRNRERWCLEIQIMRRLTH |
| | PNVVAARDVPEGMQNLAPNDLPLLAMEYCQGGDLRKYLNQFENCCGLREGAILTLLSDIASALRYLHEN |
| | RIIHRDLKPENIVLQQGEQRLIHKIIDLGYAKELDQGALCTAFVGTLQYLAPELLEQQKYTVTVDYWSFGTLAF |
| | ECITGFRPFLPNWQPVQWHSKVRQKSEVDIVVSEDLNGTVKFSSSLPYPNNLNSVLAERLEKWLQLMLM |
| | WHPRQRGTDPTYGPNGCFKALDDILNLKLVHILNMVTGTIHTYPVTEDESLQSLKARIQQDTGIPEEDQELL |
| | QEAGLALIPDKPATQCISDGKLNEGHTLDMDLVFLFDNSKITYETQISPRPQPESVSCILQEPKRNLAFFQLRK |
| | VWGQVWHSIQTLKEDCNRLQQGQRAAMMNLLRNNSCLSKMKNSMASMSQQLKAKLDFFKTSIQIDLEK |
| | YSEQTEFGITSDKLLLAWREMEQAVELCGRENEVKLLVERMMALQTDIVDLQRSPMGRKQGGTLDDLEEQ |
| | ARELYRRLREKPRDQRTEGDSQEMVRLLLQAIQSFEKKVRVIYTQLSKTVVCKQKALELLPKVEEVVSLMN |
| | EDEKTVVRLQEKRQKELWNLLKIACSKVRGPVSGSPDSMNASRLSQPGQLMSQPSTASNSLPEPAKKSEEL |
| | VAEAHNLCTLLENAIQDTVREQDQSFTALDWSWLQTEEEEHSCLEQAS |
| | (huIKK2null(S177A/S181A); P4006 without epitope tag) |
| 148 | MSWSPSLPTQTCGAWEMKERLGTGGFGNVIRWHNQATGEQIAIKQCRQELSPKNRNRWCLEIQIMRRLNHPN |
| | VVAARDVPEGMQNLAPNDLPLLAMEYCQGGDLRRYLNQFENCCGLREGAVLTLLSDIASALRYLHENRIIHRDLK |
| | PENIVLQQGEKRLIHKIIDLGYAKELDQGELCTEFVGTLQYLAPELLEQQKYTVTVDYWSFGTLAFECITGFRPFLPN |
| | WQPVQWHSKVRQKSEVDIVVSEDLNGAVKFSSSLPFPNNLNSVLAERLEKWLQLMLMWHPRQRGTDPQYGP |
| | NGCFRALDDILNLKLVHVLNMVTGTVHTYPVTEDESLQSLKTRIQENTGILETDQELLQKAGLVLLPDKPATQCISD |
| | SKTNEGLTLDMDLVFLLDNSKINYETQITPRPPPESVSCILQEPKRNLSFFQLRKVWGQVWHSIQTLKEDCNRLQQ |
| | GQRAAMMSLLRNNSCLSKMKNAMASTAQQLKAKLDFFKTSIQIDLEKYKEQTEFGITSDKLLLAWREMEQAVEQ |
| | CGRENDVKHLVERMMALQTDIVDLQRSPMGRKQGGTLDDLEEQARELYRKLREKPRDQRTEGDSQEMVRLLLQ |
| | AIQSFEKKVRVIYTQLSKTVVCKQKALELLPKVEEVVSLMNEDERTVVRLQEKRQKELWNLLKIACSKVRGPVSGSP |
| | DSMNVSRLSHPGQLMSQPSSACDSLPESDKKSEELVAEAHALCSRLESALQDTVKEQDRSFTTLDWSWLQMEDEE |
| | RCSLEQACD |
| | (muIKK2ca(S177E/S181E); P4002 without epitope tag) |
| 149 | MSWSPSLPTQTCGAWEMKERLGTGGFGNVIRWHNQATGEQIAIKQCRQELSPKNRNRWCLEIQIMRRLNHPN |
| | VVAARDVPEGMQNLAPNDLPLLAMEYCQGGDLRRYLNQFENCCGLREGAVLTLLSDIASALRYLHENRIIHRDLK |
| | PENIVLQQGEKRLIHKIIDLGYAKELDQGALCTAFVGTLQYLAPELLEQQKYTVTVDYWSFGTLAFECITGFRPFLPN |
| | WQPVQWHSKVRQKSEVDIVVSEDLNGAVKFSSSLPFPNNLNSVLAERLEKWLQLMLMWHPRQRGTDPQYGP |
| | NGCFRALDDILNLKLVHVLNMVTGTVHTYPVTEDESLQSLKTRIQENTGILETDQELLQKAGLVLLPDKPATQCISD |
| | SKTNEGLTLDMDLVFLLDNSKINYETQITPRPPPESVSCILQEPKRNLSFFQLRKVWGQVWHSIQTLKEDCNRLQQ |
| | GQRAAMMSLLRNNSCLSKMKNAMASTAQQLKAKLDFFKTSIQIDLEKYKEQTEFGITSDKLLLAWREMEQAVEQ |
| | CGRENDVKHLVERMMALQTDIVDLQRSPMGRKQGGTLDDLEEQARELYRKLREKPRDQRTEGDSQEMVRLLLQ |
| | AIQSFEKKVRVIYTQLSKTVVCKQKALELLPKVEEVVSLMNEDERTVVRLQEKRQKELWNLLKIACSKVRGPVSGSP |
| | DSMNVSRLSHPGQLMSQPSSACDSLPESDKKSEELVAEAHALCSRLESALQDTVKEQDRSFTTLDWSWLQMEDEE |
| | RCSLEQACD |
| | muIKK2null(S177A/S181A); P4003 without epitope tag) |
| 150 | MERPPGLRPGAGGPWEMRERLGTGGFGNVCLYQHRELDLKIAIKSCRLELSTKNRERWCHEIQIMKKLNHANVVK |
| | ACDVPEELNILIHDVPLLAMEYCSGGDLRKLLNKPENCCGLKESQILSLLSDIGSGIRYLHENKIIHRDLIKPENIVLQDVG |
| | GKIIHKIIDLGYAKDVDQGELCTEFVGTLQYLAPELFENKPYTATVDYWSFGTMVFECIAGYRPFLHHLQPFTWHEKIK |
| | KKDPKCIFACEEMSGEVRFSSHLPQPNSLCSLVVEPMENWLQLMLNWDPQQRGGPVDLTLKQPRCEVLMDHILNL |
| | KIVHILNMTSAKIISFLLPPDESLHSLQSRIERETGINTGSQELLSETGISLDPRKPASQCVLDGVRGCDSYMVYLFDKSK |
| | TVYEGPFASRSLSDCVNYIVQDSKIQLPIIQLRKVWAEAVHYVSGLKEDYSRLFQGQRAAMLSLLRYNANLTKMKNTL |
| | ISASQQLKAKLEFFHKSIQLDLERYSEQMTYGISSEKMLKAWKEMEEKAIHYAEVGVIGYLEDQIMSLHAEIMELQKS |
| | PYRRQGDLMESLEQRAIDLYKQLKHRPSDHSYSDSTEMVKIIVHTVQSQDRVLKELFGHLSKLLGCKQKIIDLLPKVEV |
| | ALSNIKEADNTVMFMQGKRQKEIWHLLKIACTQAAARALVGAALEGAVAPQAAAWLPPAAAEHDHALACVVAPQ |
| | DGEAAAQMIEENLNCLGHLAAIIHEANEEQGNSMMNLDWSWLTE |
| | Human constitutively active IKK alpha (PEST mutation) P.4013/4014 without epitope |
| | tag - amino acid |
| 151 | ATGGAACGCCCCCCTGGACTGAGGCCTGGAGCAGGAGGACCCTGGGAAATGCGCGAACGGCTGGGTACTGGT |
| | GGTTTCGGCAACGTGTGCCTCTACCAGCATCGGGAGTTGGACCTGAAGATCGCCATCAAGTCCTGCCGCCTGG |
| | AGCTGTCGACCAAGAACCGGGAACGCTGGTGTCATGAAATCCAGATTATGAAAAAGCTGAACCACGCTAACGT |
| | GGTCAAAGCTTGCGACGTGCCCGAAGAACTGAATATCCTGATCCACGATGTGCCCCTCCTCGCAATGGAGTACT |
| | GCAGCGGAGGCGATCTCCGGAAGCTGCTCAACAAGCCGGAGAACTGCTGTGGCCTTAAAGAGAGCCAGATTC |
| | TGAGCCTTCTGTCGGACATCGGCTCGGGTATCCGATATCTTCACGAGAACAAGATTATTCACAGAGATCTGAAG |
| | CCAGAGAACATCGTGCTGCAAGATGTCGGAGGAAAGATCATTCATAAGATCATCGACCTGGGATACGCCAAGG |
| | ACGTGGATCAAGGCGAACTGTGCACCGAATTCGTGGGAACCCTCCAGTACCTGGCCCCGGAACTGTTCGAAAA |
| | CAAACCCTACACCGCCACCGTGGACTACTGGTCCTTTGGAACTATGGTGTTCGAGTGTATAGCTGGCTACCGGC |
| | CATTTCTCCATCACTTGCAGCCCTTCACCTGGCACGAAAAGATCAAGAAGAAGGACCCCAAGTGCATTTTCGCG |
| | TGCGAAGAGATGTCGGGGGAAGTGCGCTTCTCGTCCCACTTGCCCCAGCCCAACTCCCTGTGCTCCCTGGTGGT |
| | CGAACCGATGGAAAACTGGCTGCAACTGATGCTGAACTGGGATCCTCAACAGCGCGGTGGACCAGTGGATCTG |
| | ACTCTGAAGCAGCCCAGATGCTTCGTGCTGATGGACCATATCCTGAACCTCAAGATCGTCCACATCCTGAACAT |
| | GACCTCCGCCAAGATCATTTCCTTCCTCCTCCCGCCCGATGAGAGCCTGCACTCACTGCAGTCCAGAATCGAGA |
| | GGGAAACCGGTATTAACACTGGGTCACAGGAACTCCTGTCCGAAACCGGAATCTCTCTGGACCCTCGCAAGCC |
| | AGCATCCCAGTGCGTCCTGGATGGGGTCAGGGGATGCGACTCGTACATGGTCTACCTCTTCGATAAGTCAAAG |
| | ACCGTCTACGAGGGACCCTTTGCCAGCCGGAGCCTGTCAGACTGCGTGAACTACATCGTGCAGGACTCTAAGA |
| | TTCAGCTGCCAATTATCCAGCTCCGGAAAGTCTGGGCAGAAGCGGTGCACTACGTGTCCGGACTGAAAGAGGA |
| | CTACTCCCGGCTGTTCCAGGGCCAGAGGGCAGCCATGCTGTCCCTGCTCCGCTACAACGCCAACCTCACGAAGA |
| | TGAAGAACACCCTGATCTCCGCGTCACAACAACTGAAGGCCAAGCTGGAATTCTTCCACAAGTCCATTCAATTG |
| | GATCTGGAGCGGTACTCCGAGCAGATGACTTACGGCATTAGCTCCGAAAAGATGCTCAAGGCCTGGAAGGAG |
| | ATGGAGGAGAAGGCCATTCATTATGCCGAAGTGGGGGTGATCGGATACCTGGAGGATCAGATCATGTCCCTTC |
| | ATGCCGAGATTATGGAACTCCAGAAGTCCCCGTACCGGAGGCAGGGCGATTTGATGGAGAGCTTGGAACAAC |
| | GCGCCATCGACCTGTACAAGCAGCTCAAGCACAGACCGAGCGACCACTCGTACTCCGACTCGACTGAGATGGT |
| | GAAAATTATCGTGCACACCGTGCAGTCCCAAGACCGGGTCCTGAAGGAGCTGTTCGGACACCTGAGCAAGCTG |
| | CTGGGGTGCAAGCAAAAGATCATTGACCTTCTGCCAAAAGTGGAGGTGGCCCTGAGCAACATTAAGGAAGCC |
| | GACAACACCGTGATGTTCATGCAGGGCAAGCGGCAGAAGGAGATCTGGCATCTTCTCAAGATCGCGTGTACCC |
| | AGGCTGCAGCGAGAGCCTTGGTGGGCGCTGCCCTGGAAGGTGCCGTGGCACCACAGGCCGCTGCTTGGCTGC |
| | CTCCTGCTGCTGCTGAGCACGATCACGCACTGGCCTGCGTGGTGGCACCGCAGGACGGAGAGGCTGCCGCGC |
| | AGATGATCGAGGAAAACCTGAACTGCCTGGGTCACCTGGCTGCCATCATCCACGAAGCCAACGAGGAGCAAG |
| | GAAACAGCATGATGAATCTCGACTGGAGCTGGCTGACTGAG |
| | Human constitutively active IKK alpha (PEST mutation) P.4013/4014 without epitope |
| | tag - nucleotide |
| 152 | MSWSPSLTTQTCGAWEMKERLGTGGFGNVIRWHNQETGEQIAIKQCRQELSPRNRERWCLEIQIMRRLTHPNVV |
| | AARDVPEGMQNLAPNDLPLLAMEYCQGGDLRKYLNQFENCCGLREGAILTLLSDIASALRYLHENRIIHRDLKPENIV |
| | LQQGEQRLIHKIIDLGYAKELDQGELCTEFVGTLQYLAPELLEQQKYTVTVDYWSFGTLAFECITGFRPFLPNWQPVQ |
| | WHSKVRQKSEVDIVVSEDLNGTVKFSSSLPYPNNLNSVLAERLEKWLQLMLMWHPRQRGTDPTYGPNGCFKALD |
| | DILNLKLVHILNMVTGTIHTYPVTEDESLQSLKARIQQDTGIPEEDQELLQEAGLALIPDKPATQCISDGKLNEGHTLD |
| | MDLVFLFDNSKITYETQISPRPQPESVSCILQEPKRNLAFFQLRKVWGQVWHSIQTLKEDCNRLOQGQRAAMMNL |
| | LRNNSCLSKMKNSMASMSQQLKAKLDFFIKTSIQIDLEKYSEQTEFGITSDKLLLAWREMEQAVELCGRENEVKLLVE |
| | RMMALQTDIVDLQRSPMGRKQGGTLDDLEEQARELYRRLREKPRDQRTEGDSQEMVRLLLQAIQSFEKKVRVIYT |
| | QLSKTVVCKQKALELLPKVEEVVSLMNEDEKTVVRLQEKRQKELWNLLKIACSKVRGPVAGAPDAMNAARLAQPG |
| | QLMAQPATAANALPEPAKKAEELVAEAHNLCTLLENAIQDTVREQDQSFTALDWSWLQTEEEEHSCLEQAS |
| | Human constitutively active IKK beta (PEST mutation) P.4015/4016 without epitope |
| | tag - amino acid |
| 153 | ATGTCGTGGTCCCCCTCACTTACTACTCAAACTTGCGGCGCCTGGGAAATGAAGGAAAGACTCGGTACCGGGG |
| | GATTTGGAAACGTGATCCGGTGGCACAACCAAGAAACCGGAGAGCAAATTGCGATCAAGCAGTGTAGACAGG |
| | AACTGAGCCCTCGGAACAGAGAGCGGTGGTGCCTGGAGATTCAGATTATGCGCCGGCTGACCCATCCGAACGT |
| | GGTGGCTGCCAGGGATGTCCCGGAGGGCATGCAGAACCTGGCCCCTAACGACCTCCCACTCCTGGCCATGGAA |
| | TACTGCCAGGGTGGCGATCTGCGGAAGTACCTTAACCAATTCGAAAACTGCTGTGGACTCAGGGAAGGGGCCA |
| | TTCTGACTCTCTTGTCGGACATCGCCAGCGCCCTGAGATACCTCCACGAGAACAGAATCATCCATCGCGATCTG |
| | AAGCCGGAGAACATTGTGCTGCAACAGGGCGAACAGCGGCTGATCCACAAAATCATTGATCTCGGATATGCCA |
| | AGGAACTGGACCAGGGCGAACTCTGCACCGAATTCGTGGGCACTCTCCAGTACCTGGCACCCGAGTTGCTGGA |
| | GCAGCAGAAGTACACCGTCACCGTCGACTACTGGTCCTTCGGAACCCTCGCATTCGAATGTATCACTGGCTTCC |
| | GCCCTTTCCTGCCTAACTGGCAGCCTGTGCAGTGGCATTCGAAGGTCCGGCAGAAATCGGAGGTGGACATCGT |
| | GGTGTCCGAGGATCTGAACGGCACAGTGAAGTTCTCCTCCTCACTGCCTTACCCCAACAACCTCAACTCCGTGCT |
| | GGCCGAACGGCTGGAAAAGTGGCTCCAGCTTATGCTGATGTGGCATCCACGCCAGCGGGGTACTGATCCGACC |
| | TACGGTCCGAACGGGTGCTTCAAGGCCCTGGACGACATACTGAACCTCAAGCTCGTGCACATCCTCAATATGGT |
| | GACCGGCACGATCCATACTTACCCCGTCACCGAGGACGAATCGTTGCAGTCACTGAAGGCTCGGATCCAGCAG |
| | GACACCGGGATTCCCGAAGAGGACCAGGAACTTCTGCAGGAAGCGGGACTGGCGTTGATCCCCGACAAGCCT |
| | GCCACCCAGTGCATCTCTGACGGGAAGCTGAATGAAGGTCACACCCTGGATATGGACCTTGTGTTCCTGTTCGA |
| | CAATTCCAAGATCACCTACGAGACTCAGATTAGCCCTAGGCCTCAGCCGGAATCCGTGTCGTGCATCCTGCAAG |
| | AACCGAAGCGGAATCTGGCGTTCTTTCAACTGCGGAAAGTGTGGGGCCAAGTCTGGCACAGCATTCAGACACT |
| | GAAGGAGGATTGCAACCGGCTGCAGCAAGGACAGCGCGCCGCTATGATGAATCTGCTGCGCAACAATTCCTGC |
| | CTCTCAAAAATGAAGAACTCCATGGCCTCGATGTCCCAGCAATTGAAGGCCAAGCTGGATTTCTTCAAGACCTC |
| | GATCCAGATCGACCTGGAAAAGTACAGCGAGCAGACCGAGTTCGGAATCACCTCCGACAAGCTGCTGTTGGCA |
| | TGGCGGGAGATGGAACAAGCGGTGGAGCTGTGCGGACGCGAAAACGAGGTCAAACTGTTGGTGGAAAGAAT |
| | GATGGCCCTGCAGACCGACATCGTGGACCTCCAGCGATCCCCTATGGGCCGGAAGCAGGGTGGCACCCTCGAT |
| | GACCTGGAAGAACAGGCTCGGGAGCTGTACAGGCGCCTGCGGGAAAAGCCGCGGGACCAGAGAACTGAAGG |
| | GGATTCCCAGGAGATGGTGCGCCTGCTGCTTCAAGCCATCCAGTCATTCGAAAAGAAGGTCCGCGTGATCTAC |
| | ACCCAACTGAGCAAGACTGTGGTGTGCAAGCAGAAGGCCCTCGAACTGCTGCCGAAGGTGGAGGAGGTCGTG |
| | TCCCTGATGAACGAGGACGAAAAGACGGTCGTGAGACTCCAGGAAAAGAGACAGAAGGAACTGTGGAACCTT |
| | CTCAAGATTGCCTGCTCCAAAGTGCGCGGACCTGTGGCTGGAGCTCCCGACGCCATGAACGCCGCTAGACTCG |
| | CGCAGCCTGGACAGCTCATGGCCCAGCCCGCAACTGCAGCTAACGCCCTGCCCGAACCAGCGAAGAAGGCGG |
| | AGGAGCTTGTGGCGGAAGCCCACAACCTGTGCACCCTGCTCGAAAACGCCATCCAGGACACTGTGCGGGAACA |
| | AGACCAATCCTTCACCGCCCTGGATTGGTCATGGCTGCAGACTGAGGAAGAGGAGCACTCCTGTCTGGAGCAA |
| | GCCTCC |
| | Humanc onstitutively active IKK beta (PEST mutation) P.4015/4016 without epitope |
| | tag - nucleotide |
| 154 | MERPPGLRPGAGGPWEMRERLGTGGFGNVSLYQHRELDLKIAIKSCRLELSSKNRERWCHEIQIMKKLDHANVVKA |
| | CDVPEELNFLINDVPLLAMEYCSGGDLRKLLNKPENCCGLKESQILSLLSDIGSGIRYLHENKIIHRDLKPENIVLQDVG |
| | GKTIHKIIDLGYAKDVDQGELCTEFVGTLQYLAPELFENKPYTATVDYWSFGTMVFECIAGYRPFLHHLQPFTWHEKI |
| | KKKDPKCIFACEEMTGEVRFSSHLPQPNSLCSLIVEPMESWLQLMLNWDPQQRGGPIDLTLKQPRCFALMDHILNL |
| | KIVHILNMTSAKIISFLLPCDESLHSLQSRIERETGINTGSQELLSETGISLDPRKPASQCVLDGVRGCDSYMVYLFDKSK |
| | TVYEGPFASRSLSDCVNYIVQDSKIQLPIIQLRKVWAEAVHYVSGLIKEDYSRLFQGQRAAMLSLLRYNANLTKMKNTL |
| | ISASQQLKAKLEFFRKSIQLDLERYSEQMTYGISSEKMLKAWKEMEEKAIHYSEVGVIGYLEDQIMSLHTEIMELQKSP |
| | YGRRQGDLMESLEQRAIDLYKQLKHRPPDHLYSDSTEMVKIIVHTVQSQDRVLKELFGHLSKLLGCKQKIIDLLPKVEV |
| | ALSNIKEADNTVMFMQGKRQKEIWHLLKIACTQAAARALVGAALEGAVAPPVAAWLPPALADREHPLTCVVAPQD |
| | GEALAQMIEENLNCLGHLAAIIREANEDQSSSLMSLDWSWLAE |
| | Mouse constitutively active IKK alpha (PEST mutation) P.4017/4018 without epitope |
| | tag - amino acid |
| 155 | ATGGAAAGACCGCCTGGATTGCGACCTGGAGCCGGAGGACCCTGGGAAATGAGAGAGAGATTGGGTACTGG |
| | AGGCTTCGGAAATGTCTCGCTGTACCAGCACCGCGAGCTCGACCTGAAGATCGCGATCAAGTCCTGTCGCCTG |
| | GAGCTGTCCAGCAAGAACAGAGAGCGGTGGTGCCACGAGATCCAGATTATGAAGAAGCTGGACCATGCCAAC |
| | GTCGTGAAGGCTTGCGATGTCCCGGAGGAACTCAATTTCCTTATTAACGACGTGCCGCTTCTCGCGATGGAGTA |
| | CTGCTCAGGCGGCGACTTGCGCAAGCTGCTTAACAAGCCCGAAAACTGCTGCGGTCTGAAGGAATCCCAAATT |
| | CTGTCACTCCTGTCCGATATTGGCTCAGGAATCCGCTACCTTCATGAGAATAAGATCATCCACCGCGACCTGAA |
| | GCCTGAGAACATTGTGCTGCAGGATGTCGGGGGAAAGACTATCCACAAGATAATCGACCTGGGATACGCCAA |
| | GGACGTCGATCAAGGGGAACTGTGCACCGAATTCGTGGGGACTCTCCAGTACTTGGCCCCCGAACTGTTTGAA |
| | AACAAGCCCTACACCGCCACCGTGGATTACTGGTCCTTCGGGACTATGGTGTTCGAGTGTATTGCCGGCTATCG |
| | CCCCTTTCTGCACCACCTCCAGCCCTTTACTTGGCACGAAAAGATCAAGAAGAAGGATCCGAAGTGCATCTTCG |
| | CTGCGAAGAGATGACCGGAGAAGTCCGGTTTTCCAGCCATCTGCCTCAGCCGAACTCCCTGTGTTCCCTGATT |
| | GTGGAACCCATGGAGAGCTGGTTGCAGCTCATGCTCAACTGGGATCCGCAGCAACGCGGTGGCCCAATCGATC |
| | TTACCCTTAAGCAGCCTCGGTGCTTCGCGCTGATGGACCACATCCTCAATCTGAAGATCGTGCACATCCTGAAC |
| | ATGACTTCCGCCAAGATCATCTCCTTCCTGCTGCCGTGCGACGAAAGCCTGCACTCACTGCAGAGCCGGATCGA |
| | ACGGGAGACAGGCATAAACACGGGATCGCAAGAACTGCTGTCCGAAACCGGCATCTCCCTGGACCCACGGAA |
| | GCCTGCCTCCCAATGCGTCCTGGACGGAGTGCGGGGTTGCGACTCATACATGGTGTACCTCTTCGATAAGTCAA |
| | AGACCGTGTATGAAGGACCCTTCGCCTCCCGCTCCCTGAGCGACTGCGTGAACTACATCGTGCAGGACTCGAA |
| | GATCCAGCTGCCGATTATCCAGCTTCGGAAGGTCTGGGCGGAGGCTGTGCACTACGTGTCCGGTTTGAAAGAG |
| | GATTATAGCCGCCTGTTCCAGGGACAGAGAGCCGCCATGCTGTCCCTCCTCCGGTACAACGCCAACCTGACCAA |
| | GATGAAGAACACCCTGATCAGCGCCTCGCAGCAGCTGAAGGCCAAGCTGGAGTTCTTCCGGAAGTCGATCCAG |
| | CTCGACCTCGAAAGGTACTCAGAACAGATGACCTACGGAATTTCCTCCGAGAAGATGCTGAAAGCCTGGAAGG |
| | AAATGGAGGAGAAGGCCATTCACTACTCCGAAGTGGGCGTCATTGGCTACTTGGAGGACCAAATCATGTCTCT |
| | GCACACCGAAATCATGGAACTCCAGAAGTCGCCTTACGGACGACGCCAAGGGGACCTGATGGAGAGCCTGGA |
| | ACAGCGGGCCATCGATCTGTACAAGCAACTGAAGCATAGGCCGCCCGACCATCTCTACTCCGACTCGACTGAAA |
| | TGGTGAAGATTATTGTGCATACAGTGCAGAGCCAGGACAGAGTGCTGAAGGAGCTGTTCGGCCACCTGTCCAA |
| | GCTCCTGGGTTGCAAGCAGAAGATTATCGATCTGTTGCCCAAGGTGGAAGTGGCCCTGTCTAACATCAAAGAA |
| | GCCGACAACACTGTGATGTTTATGCAAGGAAAGCGGCAGAAAGAAATCTGGCACCTTCTGAAAATCGCGTGCA |
| | CCCAGGCTGCAGCTAGGGCACTCGTGGGTGCAGCGCTTGAAGGCGCCGTGGCACCTCCTGTCGCTGCCTGGTT |
| | GCCACCCGCGCTTGCTGACAGAGAGCACCCACTGACTTGTGTGGTGGCCCCACAGGACGGAGAAGCACTGGCC |
| | CAGATGATTGAGGAGAACCTGAACTGTCTGGGACACCTTGCCGCCATTATCCGGGAGGCCAACGAGGACCAGT |
| | CCTCGTCCCTGATGTCCCTGGATTGGTCATGGCTCGCTGAA |
| | Mouse constitutively active IKK alpha (PEST mutation) P.4017/4018 without epitope |
| | tag - nucleotide |
| 156 | MSWSPSLPTQTCGAWEMKERLGTGGFGNVIRWHNQATGEQIAKQCRQELSPKNRNRWCLEIQIMRRLNHPNV |
| | VAARDVPEGMQNLAPNDLPLLAMEYCQGGDLRRYLNQFENCCGLREGAVLTLLSDIASALRYLHENRIIHRDLKPEN |
| | IVLQQGEKRLIHKIIDLGYAKELDQGELCTEFVGTLQYLAPELLEQQKYTVTVDYWSFGTLAFECITGFRPFLPNWQPV |
| | QWHSKVRQKSEVDIVVSEDLNGAVKFSSSLPFPNNLNSVLAERLEKWLQLMLMWHPRQRGTDPQYGPNGCFRAL |
| | DDILNLKLVHVLNMVTGTVHTYPVTEDESLQSLKTRIQENTGILETDQELLQKAGLVLLPDKPATQCISDSKTNEGLTL |
| | DMDLVFLLDNSKINYETQITPRPPPESVSCILQEPKRNLSFFQLRKVWGQVWHSIQTLKEDCNRLQQGQRAAMMSL |
| | LRNNSCLSKMKNAMASTAQQLKAKLDFFKTSIQIDLEKYKEQTEFGITSDKLLLAWREMEQAVEQCGRENDVKHLV |
| | ERMMALQTDIVIDLQRSPMGRKQGGTLDDLEEQARELYRKLREKPRDQRTEGDSQEMVRLLLQAIQSFEKKVRVIYT |
| | QLSKTVVCKQKALELLPKVEEVVSLMNEDERTVVRLQEKRQKELWNLLKIACSKVRGPVAGAPDAMNVARLAHPG |
| | QLMAQPASACDALPESDKKAEELVAEAHALCSRLESALQDTVKEQDRSFTTLDWSWLQMEDEERCSLEQACD |
| | Mouse constitutively active IKK beta (PEST mutation) P.4019/4020 without epitope |
| | tag - amino acid |
| 157 | ATGAGCTGGAGCCCTTCACTGCCAACCCAAACCTGTGGAGCCTGGGAAATGAAAGAAAGACTGGGAACCGGA |
| | GGTTTCGGCAACGTGATCCGCTGGCATAACCAGGCCACTGGGGAGCAGATTGCCATCAAGCAGTGCCGGCAG |
| | GAGCTGTCCCCGAAGAACCGCAACCGGTGGTGCCTGGAAATCCAGATCATGCGGCGGCTTAACCACCCCAACG |
| | TGGTCGCCGCGAGAGATGTGCCGGAGGGCATGCAAAACCTGGCCCCCAACGATCTCCCGCTGTTGGCGATGG |
| | AGTATTGCCAGGGTGGCGATCTGCGGCGCTACCTGAATCAATTCGAGAACTGCTGCGGTCTGCGCGAAGGAGC |
| | TGTGCTTACGCTGCTCTCGGACATCGCCTCGGCGCTGAGATACCTCCACGAAAATCGGATCATCCACCGAGATC |
| | TCAAGCCGGAAAACATTGTGCTTCAGCAAGGGGAAAAGCGCCTCATCCATAAGATCATCGATCTCGGCTACGC |
| | CAAGGAGTTGGACCAGGGGGAGCTCTGCACTGAATTCGTGGGAACTCTGCAGTACTTGGCGCCCGAACTGCTG |
| | GAGCAACAGAAGTACACTGTGACCGTGGACTACTGGTCCTTTGGAACCCTGGCCTTCGAGTGCATTACTGGCTT |
| | CCGGCCTTTCCTTCCAAACTGGCAGCCGGTGCAGTGGCACTCAAAGGTCCGCCAGAAGTCCGAAGTGGACATC |
| | GTGGTGTCCGAGGACTTGAACGGCGCCGTGAAGTTCTCGTCCTCCCTGCCCTTCCCGAACAACCTCAACTCCGT |
| | GCTGGCCGAGAGGCTGGAAAAGTGGCTGCAGCTTATGCTGATGTGGCACCCTAGACAGCGCGGAACTGATCC |
| | GCAGTACGGCCCGAACGGCTGTTTTAGGGCCCTGGACGACATTCTGAACCTGAAACTCGTCCACGTGCTTAACA |
| | TGGTCACCGGTACCGTCCATACCTATCCGGTCACCGAGGACGAATCCCTGCAGTCCCTCAAGACTCGGATTCAG |
| | GAGAATACCGGCATTCTGGAAACCGACCAGGAGCTGCTGCAGAAGGCCGGACTGGTGCTGCTCCCCGATAAG |
| | CCCGCAACCCAGTGCATCTCAGACTCCAAGACCAACGAGGGCCTGACTCTCGACATGGACCTGGTGTTCCTGCT |
| | CGACAACAGCAAGATCAACTACGAAACCCAAATTACCCCTAGACCACCACCTGAATCCGTGAGCTGCATACTGC |
| | AGGAGCCCAAGCGCAACCTCTCCTTCTTCCAACTCCGGAAGGTCTGGGGCCAAGTGTGGCACTCCATTCAGACT |
| | CTGAAGGAAGATTGTAACAGGCTGCAGCAGGGACAGAGAGCCGCCATGATGAGCCTTCTGAGGAACAACTCT |
| | TGCCTGTCAAAGATGAAGAACGCCATGGCTTCCACCGCGCAGCAGTTGAAGGCGAAGCTGGACTTCTTTAAGA |
| | CCTCCATCCAAATCGACCTGGAGAAGTACAAGGAACAGACTGAGTTCGGGATTACGAGCGATAAACTCCTGCT |
| | CGCTTGGCGGGAAATGGAGCAAGCAGTGGAGCAGTGCGGACGGGAGAACGACGTCAAGCATCTCGTGGAGC |
| | GGATGATGGCGCTGCAGACCGACATTGTCGACTTGCAGCGCTCTCCAATGGGACGGAAGCAGGGAGGGACTC |
| | TGGACGATCTGGAGGAACAGGCCCGGGAACTGTACAGAAAGCTGAGGGAGAAGCCCCGGGATCAAAGAACC |
| | GAAGGAGACTCGCAAGAGATGGTGCGCCTGCTGCTGCAGGCGATCCAGTCCTTCGAGAAGAAGGTCCGCGTG |
| | ATCTACACTCAGCTGTCCAAGACCGTGGTCTGTAAACAGAAGGCCCTGGAACTGCTCCCGAAAGTGGAAGAAG |
| | TGGTGTCGCTCATGAATGAGGACGAGAGAACCGTGGTGCGCCTCCAAGAAAAGCGGCAGAAGGAACTCTGGA |
| | ACCTCCTCAAGATTGCCTGCTCGAAAGTGCGGGGACCTGTGGCTGGTGCTCCTGACGCCATGAACGTGGCCAG |
| | GCTTGCTCACCCTGGCCAACTTATGGCCCAGCCTGCATCCGCCTGTGACGCACTGCCCGAGTCGGACAAGAAG |
| | GCCGAAGAACTGGTCGCCGAAGCCCACGCACTGTGCAGCCGCCTGGAAAGCGCGCTGCAGGACACCGTGAAG |
| | GAGCAGGACCGCAGCTTTACCACTCTTGATTGGTCCTGGCTGCAAATGGAGGACGAAGAACGGTGCTCCCTGG |
| | AACAGGCCTGCGAC |
| | Mouse constitutively active IKKbeta (PEST mutation) P.4019/4020 without epitope |
| | tag - nucleotide |
| 158 | MQPDMSLNVIKMKSSDFLESAELDSGGFGKVSLCFHRTQGLMIMKTVYKGPNCIEHNEALLEEAKMMNRLRHSRV |
| | VKLLGVIIEEGKYSLVMEYMEKGNLMHVLKAEMSTPLSVKGRIILEIIEGMCYLHGKGVIHKDLKPENILVDNDFHIKIA |
| | DLGLASFKMWSKLNNEEHNELREVDGTAKKNGGTLYYMAPEHLNDVNAKPTEKSDVYSFAVVLWAIFANKEPYEN |
| | AICEQQLIMCIKSGNRPDVDDITEYCPREIISLMKLCWEANPEARPTFPGIEEKFRPFYLSQLEESVEEDVKSLKKEYSNE |
| | NAVVKRMQSLQLDCVAVPSSRSNSATEQPGSLHSSQGLGMGPVEESWFAPSLEHPQEENEPSLQSKLQDEANYHL |
| | YGSRMDRQTKQQPRQNVAYNREEERRRRVSHDPFAQQRPYENFQNTEGKGTAYSSAASHGNAVHQPSGLTSQP |
| | QVLYQNNGLYSSHGFGTRPLDPGTAGPRVWYRPIPSHMPSLHNIPVPETNYLGNTPTMPFSSLPPTDESIKYTIYNST |
| | GIQIGAYNYMEIGGTSSSGGIKKEIEAIKKEQEAIKKKIEAIEKEIEA |
| | (huRIPK1(1-555).IZ.TM; TH1021 without epitope tag) |
| 159 | MQPDMSLNVIKMKSSDFLESAELDSGGFGKVSLCFHRTQGLMIMKTVYKGPNCIEHNEALLEEAKMMNRLRHSRV |
| | VKLLGVIIEEGKYSLVMEYMEKGNLMHVLKAEMSTPLSVKGRIILEIIEGMCYLHGKGVIHKDLKPENILVDNDFHIKIA |
| | DLGLASFKMWSKLNNEEHNELREVDGTAKKNGGTLYYMAPEHLNDVNAKPTEKSDVYSFAVVLWAIFANKEPYEN |
| | AICEQQLIMCIKSGNRPDVDDITEYCPREIISLMKLCWEANPEARPTFPGIEEKFRPFYLSQLEESVEEDVKSLKKEYSNE |
| | NAVVKRMQSLQLDCVAVPSSRSNSATEQPGSLHSSQGLGMGPVEESWFAPSLEHPQEENEPSLQSKLQDEANYHL |
| | YGSRMDRQTKQQPRQNVAYNREEERRRRVSHDPFAQQRPYENFQNTEGKGTAYSSAASHGNAVHQPSGLTSQP |
| | QVLYQNNGLYSSHGFGTRPLDPGTAGPRVWYRPIPSHMPSLHNIPVPETNYLGNTPTMPFSSLPPTDESIKYTIYNST |
| | GIQIGAYNYMEIGGTSSSGSDGSGSGSGSITIRAAFLEKENTALRTEIAELEKEVGRCENIVSKYETRYGPL |
| | (huRIPK1(1-555).EE.DM; TH1022 without epitope tag) |
| 160 | MQPDMSLNVIKMKSSDFLESAELDSGGFGKVSLCFHRTQGLMIMKTVYKGPNCIEHNEALLEEAKMMNRLRHSRV |
| | VKLLGVIIEEGKYSLVMEYMEKGNLMHVLKAEMSTPLSVKGRIILEIIEGMCYLHGKGVIHKDLKPENILVDNDFHIKIA |
| | DLGLASFKMWSKLNNEEHNELREVDGTAKKNGGTLYYMAPEHLNDVNAKPTEKSDVYSFAVVLWAIFANKEPYEN |
| | AICEQQLIMCIKSGNRPDVDDITEYCPREIISLMKLCWEANPEARPTFPGIEEKFRPFYLSQLEESVEEDVKSLKKEYSNE |
| | NAVVKRMQSLQLDCVAVPSSRSNSATEQPGSLHSSQGLGMGPVEESWFAPSLEHPQEENEPSLQSKLQDEANYHL |
| | YGSRMDRQTKQQPRQNVAYNREEERRRRVSHDPFAQQRPYENFQNTEGKGTAYSSAASHGNAVHQPSGLTSQP |
| | QVLYQNNGLYSSHGFGTRPLDPGTAGPRVWYRPIPSHMPSLHNIPVPETNYLGNTPTMPFSSLPPTDESIKYTIYNST |
| | GIQIGAYNYMEIGGTSSSGSDGSGSGSGSLEIRAAFLEKENTALRTRAAELRKRVGRCRNIVSKYETRYGPL |
| | (huRIPK1(1-555).RR.DM; TH1023 without epitope tag) |
| 161 | MQPDMSLDNIKMASSDLLEKTDLDSGGFGKVSLCYHRSHGFVILKKVYTGPNRAEYNEVLLEEGKMMHRLRHSRV |
| | VKLLGIIIEEGNYSLVMEYMEKGNLMHVLKTQIDVPLSLKGRIIVEAIEGMCYLHDKGVIHKDLKPENILVDRDFHIKIA |
| | DLGVASFKTWSKLTKEKDNKQKEVSSTTKKNNGGTLYYMAPEHLNDINAKPTEKSDVYSFGIVLWAIFAKKEPYENVI |
| | CTEQFVICIKSGNRPNVEEILEYCPREIISLMERCWQAIPEDRPTFLGIEEEFRPFYLSHFEEYVEEDVASLKKEYPDQSP |
| | VLQRMFSLQHDCVPLPPSRSNSEQPGSLHSSQGLQMGPVEESWFSSSPEYPQDENDRSVQAKLQEEASYHAFGIFA |
| | EKQTKPQPRQNEAYNREEERKRRVSHDPFAQQRARENIKSAGARGHSDPSTTSRGIAVQQLSWPATQTVWNNGL |
| | YNQHGFGTTGTGVWYPPNLSQMYSTYKTPVPETNIPGSTPTMPYFSGPVADDLIKYTIFNSSGIQIGNHNYMDVGL |
| | NSQPPNNTCKEESTSGGIKKEIEAIKKEQEAIKKKIEAIEKEIEA |
| | (msRIPK1(1-555).IZ.TM; TH1024 without epitope tag) |
| 162 | MQPDMSLDNIKMASSDLLEKTDLDSGGFGKVSLCYHRSHGFVILKKVYTGPNRAEYNEVLLEEGKMMHRLRHSRV |
| | VKLLGIIIEEGNYSLVMEYMEKGNLMHVLKTQIDVPLSLKGRIIVEAIEGMCYLHDKGVIHKDLKPENILVDRDFHIKIA |
| | DLGVASFKTWSKLTKEKDNKQKEVSSTTKKNNGGTLYYMAPEHLNDINAKPTEKSDVYSFGIVLWAIFAKKEPYENVI |
| | CTEQFVICIKSGNRPNVEEILEYCPREIISLMERCWQAIPEDRPTFLGIEEEFRPFYLSHFEEYVEEDVASLKKEYPDQSP |
| | VLQRMFSLQHDCVPLPPSRSNSEQPGSLHSSQGLQMGPVEESWFSSSPEYPQDENDRSVQAKLQEEASYHAFGIFA |
| | EKQTKPQPRQNEAYNREEERKRRVSHDPFAQQRARENIKSAGARGHSDPSTTSRGIAVQQLSWPATQTVWNNGL |
| | YNQHGFGTTGTGVWYPPNLSQMYSTYKTPVPETNIPGSTPTMPYFSGPVADDLIKYTIFNSSGIQIGNHNYMDVGL |
| | NSQPPNNTCKEESTSGSDGSGSGSGSITIRAAFLEKENTALRTEIAELEKEVGRCENIVSKYETRYGPL |
| | (msRIPK1(1-555).EE.DM; TH1025 without epitope tag) |
| 163 | MQPDMSLDNIKMASSDLLEKTDLDSGGFGKVSLCYHRSHGFVILKKVYTGPNRAEYNEVLLEEGKMMHRLRHSRV |
| | VKLLGIIIEEGNYSLVMEYMEKGNLMHVLKTQIDVPLSLKGRIIVEAIEGMCYLHDKGVIHKDLKPENILVDRDFHIKIA |
| | DLGVASFKTWSKLTKEKDNKQKEVSSTTKKNNGGTLYYMAPEHLNDINAKPTEKSDVYSFGIVLWAIFAKKEPYENVI |
| | CTEQFVICIKSGNRPNVEEILEYCPREIISLMERCWQAIPEDRPTFLGIEEEFRPFYLSHFEEYVEEDVASLKKEYPDQSP |
| | VLQRMFSLQHDCVPLPPSRSNSEQPGSLHSSQGLQMGPVEESWFSSSPEYPQDENDRSVQAKLQEEASYHAFGIFA |
| | EKQTKPQPRQNEAYNREEERKRRVSHDPFAQQRARENIKSAGARGHSDPSTTSRGIAVQQLSWPATQTVWNNGL |
| | YNQHGFGTTGTGVWYPPNLSQMYSTYKTPVPETNIPGSTPTMPYFSGPVADDLIKYTIFNSSGIQIGNHNYMDVGL |
| | NSQPPNNTCKEESTSGSDGSGSGSGSLEIRAAFLEKENTALRTRAAELRKRVGRCRNIVSKYETRYGPL |
| | (msRIPK1(1-555).RR.DM; TH1026 without epitope tag) |
| 164 | MSTASAASSSSSSSAGEMIEAPSQVLNFEEIDYKEIEVEEVVGRGAFGVVCKAKWRAKDVAIKQIESESERKAFIVELR |
| | QLSRVNHPNIVKLYGACLNPVCLVMEYAEGGSLYNVLHGAEPLPYYTAAHAMSWCLQCSOGVAYLHSMQPKALIH |
| | RDLKPPNLLLVAGGTVLKICDFGTACDIQTHMTNNKGSAAWMAPEVFEGSNYSEKCDVFSWGIILWEVITRRKPFD |
| | EIGGPAFRIMWAVHNGTRPPLIKNLPKPIESLMTRCWSKDPSQRPSMEEIVKIMTHLMRYFPGADEPLQYPCQEFG |
| | GGGGQSPTLTQSTNTHTQSSSSSSDGGLFRSRPAHSLPPGEDGRVEPYVDFAEFYRLWSVDHGEQSVVTAP |
| | (human TAK1-TAB1; P4031 without epitope tag) |
| 165 | MAALKSWLSRSVTSFFRYRQCLCVPVVANFKKRCFSELIRPWHKTVTIGFGVTLCAVPIAQKSEPHSLSSEALMRRAV |
| | SLVTDSTSTFLSQTTYALIEAITEYTKAVYTLTSLYRQYTSLLGKMNSEEEDEVWQVIIGARAEMTSKHQEYLKLETTW |
| | MTAVGLSEMAAEAAYQTGADQASITARNHIQLVKLQVEEVHQLSRKAETKLAEAQIEELRQKTQEEGEERAESEQE |
| | AYLRED |
| | (Diablo.1; without epitope tag) |
| 166 | MAALKSWLSRSVTSFFRYRQCLCVPVVANFKKRCFSELIRPWHKTVTIGFGVTLCAVPIAQKSEPHSLSSEALMRRAV |
| | SLVTDSTSTFLSQTTYALIEAITEYTKAVYTLTSLYRQYTSLLGKMNLEEEDEVWQVIIGARAEMTSKHQEYLKLETTW |
| | MTAVGLSEMAAEAAYQTGADQASITARNHIQLVKLQVEEVHQLSRKAETKLAEAQIEELRQKTQEEGEERAESEQE |
| | AYLRED |
| | (Diablo.1(S126L); without epitope tag) |
| 167 | MAVPIAQKSEPHSLSSEALMRRAVSLVTDSTSTFLSQTTYALIEAITEYTKAVYTLTSLYRQYTSLLGKMNSEEEDEVW |
| | QVIIGARAEMTSKHQEYLKLETTWMTAVGLSEMAAEAAYQTGADQASITARNHIQLVKLQVEEVHQLSRKAETKLA |
| | EAQIEELRQKTQEEGEERAESEQEAYLRED |
| | (Diablo.1(56-239); without epitope tag) |
| 168 | MAVPIAQKSEPHSLSSEALMRRAVSLVTDSTSTFLSQTTYALIEAITEYTKAVYTLTSLYRQYTSLLGKMNLEEEDEVW |
| | QVIIGARAEMTSKHQEYLKLETTWMTAVGLSEMAAEAAYQTGADQASITARNHIQLVKLQVEEVHQLSRKAETKLA |
| | EAQIEELRQKTQEEGEERAESEQEAYLRED |
| | (Diablo.1(56-239/S126L); without epitope tag) |
| 169 | MAALKSWLSRSVTSFFRYRQCLCVPVVANFKKRCFSELIRPWHKTVTIGFGVTLCAVPIAQAVYTLTSLYRQYTSLLGK |
| | MNSEEEDEVWQVIIGARAEMTSKHQEYLKLETTWMTAVGLSEMAAEAAYQTGADQASITARNHIQLVKLQVEEV |
| | HQLSRKAETKLAEAQIEELRQKTQEEGEERAESEQEAYLRED |
| | (Diablo.3; TH2003 without epitope tag) |
| 170 | MAALKSWLSRSVTSFFRYRQCLCVPVVANFKKRCFSELIRPWHKTVTIGFGVTLCAVPIAQAVYTLTSLYRQYTSLLGK |
| | MNLEEEDEVWQVIIGARAEMTSKHQEYLKLETTWMTAVGLSEMAAEAAYQTGADQASITARNHIQLVKLQVEEV |
| | HQLSRKAETKLAEAQIEELRQKTQEEGEERAESEQEAYLRED |
| | (Diablo.3(S8214; TH2001 without epitope tag) |
| 171 | MAVPIAQAVYTLTSLYRQYTSLLGKMNSEEEDEVWQVIIGARAEMTSKHQEYLKLETTWMTAVGLSEMAAEAAYQ |
| | TGADQASITARNHIQLVKLQVEEVHQLSRKAETKLAEAQIEELRQKTQEEGEERAESEQEAYLRED |
| | (Diablo.3(56-195); TH2002 without epitope tag) |
| 172 | MAVPIAQAVYTLTSLYRQYTSLLGKMNLEEEDEVWQVIIGARAEMTSKHQEYLKLETTWMTAVGLSEMAAEAAYQ |
| | TGADQASITARNHIQLVKLQVEEVHQLSRKAETKLAEAQIEELRQKTQEEGEERAESEQEAYLRED |
| | (Diablo.3(56-195/S82L); without epitope tag) |
| 173 | MAAVILESIFLKRSQQKKKTSPLNFKKRLFLLTVHKLSYYKYDFERGRRGSKKGSIDVEKITCVETVVPEKNPPPERQIPR |
| | RGEESSEMEQISIIERFPYPFQVVYDEGPLYVFSPTEELRKRWIHQLKNVIRYNSDLVQKYHPCFWIDGQYLCCSQTAK |
| | NAMGCQILENRNGSLKPGSSHRKTKKPLPPTPEEDQILKKPLPPEPAAAPVSTSELKKVVALYDYMPMNANDLQLRK |
| | GDEYFILEESNLPWWRARDKNGQEGYIPSNYVTEAEDSIEMYEWYSKHMTRSQAEQLLKQEGKEGGFIVRDSSKAG |
| | KYTVSVFAKSTGDPQGVIRHYVVCSTPQSQYYLAEKHLFSTIPELINYHQHNSAGLISRLKYPVSQQNKNAPSTAGLGY |
| | GSWEIDPKDLTFLKELGTGQFGVVKYGKWRGQYDVAIKMIKEGSMSEDEFIEEAKVMMNLSHEKLVQLYGVCTKQ |
| | RPIFIITEYMANGCLLNYLREMRHRFQTQQLLEMCKDVCEAMEYLESKQFLHRDLAARNCLVNDQGVVKVSDFGLS |
| | RYVLDDEYTSSVGSKFPVRWSPPEVLMYSKFSSKSDIWAFGVLMWEIYSLGKMPYERFTNSETAEHIAQGLRLYRPH |
| | LASEKVYTIMYSCWHEKADERPTFKILLSNILDVMDEES |
| | (Btk(E41K); P4029 without epitope tag) |
| 174 | MVTHSKFPAAGMSRPLDTSLRLKTFSSKSEYQLVVNAVRKLQESGFYWSAVTGGEANLLLSAEPAGTFLIRDSSDQR |
| | HFFTLSVKTQSGTKNLRIQCEGGSFSLQSDPRSTQPVPRFDCVLKLVHHYMPPPGAPSFPSPPTEPSSEVPEQPSAQP |
| | LPGSPPRRAYYIYSGGEKIPLVLSRPLSSNVATLQHLCRKTVNGHLDSYEKVTQLPGPIREFLDQYDAPL |
| | (SOCS3; P4030 without epitope tag) |
| 175 | MRMKQIEDKIEEILSKIYHIENEIARIKKLIGEADQTSGNYLNMQDSQGVLSSFPAPQAVQDNPAMPTSSGSEGNVKL |
| | CSLEEAQRIWKQKSAEIYPIMDKSSRTRLALIICNEEFDSIPRRTGAEVDITGMTMLLQNLGYSVDVKKNLTASDMTTE |
| | LEAFAHRPEHKTSDSTFLVFMSHGIREGICGKKHSEQVPDILQLNAIFNMLNTKNCPSLKDKPKVIIIQACRGDSPGVV |
| | WFKDSVGVSGNLSLPTTEEFEDDAIKKAHIEKDFIAFCSSTPDNVSWRHPTMGSVFIGRLIEHMQEYACSCDVEEIFR |
| | KVRFSFEQPDGRAQMPTTERVTLTRCFYLFPGH |
| | (IZ_hsCASP1 (self-activating human Caspase 1); P2024 without epitope tag) |
| 176 | MRMKQLEDKIEELLSKIYHLENEIARLKKLIGEADQTSGNYLNMQDSQGVLSSFPAPQAVQDNPAMPTSSGSEGNV |
| | KLCSLEEAQRIWKQKSAEIYPIMDKSSRTRLALIICNEEFDSIPRRTGAEVDITGMTMLLQNLGYSVDVKKNLTASDMT |
| | TELEAFAHRPEHKTSDSTFLVFMSHGIREGICGKKHSEQVPDILQLNAIFNMLNTKNCPSLKDKPKVIIIQACRGDSPG |
| | VVWFKDSVGVSGNLSLPTTEEFEDDAIKKAHIEKDFIAFCSSTPDNVSWRHPTMGSVFIGRLIEHMQEYACSCDVEEI |
| | FRKVRFSFEQPDGRAQMPTTERVTLTRCFYLFPGH |
| | (DM_hsCASP1 (self-activating human Caspase 1); P2025 without epitope tag) |
| 177 | MRMKQIEDKIEEILSKIYHIENEIARIKKLIGERSAPSAETFVATEDSKGGHPSSSETKEEQNKEDGTFPGLTGTLKFCPL |
| | EIKAQKLWKENPSEIYPIMNTTTRTRLALIICNTEFQHLSPRVGAQVDLREMKLLLEDLGYTVKVKENLTALEMVKEVK |
| | EFAACPEHKTSDSTFLVFMSHGIQEGICGTTYSNEVSDILKVDTIFQMMNTLKCPSLKDKPKVIIIQACRGEKQGVVLL |
| | KDSVRDSEEDFLTDAIFEDDGIKKAHIEKDFIAFCSSTPDNVSWRHPVRGSLFIESLIKHMKEYAWSCDLEDIFRKVRFS |
| | FEQPEFRLQMPTADRVTLTKRFYLFPGH |
| | (IZ_mmCASP1 (self-activating mouse Caspase 1); P2026 without epitope tag) |
| 178 | MRMKQLEDKIEELLSKIYHLENEIARLKKLIGERSAPSAETFVATEDSKGGHPSSSETKEEQNKEDGTFPGLTGTLKFCP |
| | LEKAQKLWKENPSEIYPIMNTTTRTRLALIICNTEFQHLSPRVGAQVDLREMMKLLLEDLGYTVKVKENLTALEMVKEV |
| | KEFAACPEHKTSDSTFLVFMSHGIQEGICGTTYSNEVSDILKVDTIFQMMNTLKCPSLKDKPKVIIIQACRGEKQGVVL |
| | LKDSVRDSEEDFLTDAIFEDDGIKKAHIEKDFIAFCSSTPDNVSWRHPVRGSLFIESLIKHMKEYAWSCDLEDIFRKVRF |
| | SFEQPEFRLQMPTADRVTLTKRFYLFPGH |
| | (DM_mmCASP1 (self-activating mouse Caspase 1); P2027 without epitope tag) |
| 179 | MHHHHHHHHHHGKPIPNPLLGLDSTGIPVHLELASMTNMELMSSIVHQQVFPTEAGQSLVISASIIVFNLLELEGDY |
| | RGRVLELFRAAQLANDVVLQIMELCGATR |
| | (ADR concatemer with HIS tag) |
| 180 | VVGADGVGK |
| | (KRAS G12D9 mer) |
| 181 | VVGAVGVGK |
| | (KRAS G12V9 mer) |
| 182 | VGAGDVGKS |
| | (KRAS G13D9 mer) |
| 183 | VVGACGVGK |
| | (KRAS G12C9 mer) |
| 184 | MKLVVVGACGVGKSA |
| | (KRAS G12C15 mer) |
| 185 | ATGACCGAGTACAAGCTGGTGGTGGTGGGCGCCGACGGCGTGGGCAAGAGCGCCCTGACCATCCAGCTGATC |
| | CAG |
| | (KRAS G12D25 mer nucleotide sequence) |
| 186 | ATGACCGAGTACAAGCTGGTGGTGGTGGGCGCCGTGGGCGTGGGCAAGAGCGCCCTGACCATCCAGCTGATC |
| | CAG |
| | (KRAS G12V 25 mer nucleotide sequence) |
| 187 | ATGACCGAGTACAAGCTGGTGGTGGTGGGCGCCGGCGACGTGGGCAAGAGCGCCCTGACCATCCAGCTGATC |
| | CAG |
| | (KRAS G13D25 mer nucleotide sequence) |
| 188 | ATGACCGAGTACAAGTTAGTGGTTGTGGGCGCCGACGGCGTGGGCAAGAGCGCCCTCACCATCCAGCTTATCC |
| | AGATGACGGAATATAAGTTAGTAGTAGTGGGAGCCGACGGTGTCGGCAAGTCCGCTTTGACCATTCAACTTAT |
| | TCAGATGACAGAGTATAAGCTGGTCGTTGTAGGCGCAGACGGCGTTGGAAAGTCGGCACTGACGATCCAGTT |
| | GATCCAG |
| | (KRAS G12D25 mer\hat{ }3 nucleotide sequence) |
| 189 | ATGACCGAGTACAAGCTCGTCGTGGTGGGCGCCGTGGGCGTGGGCAAGAGCGCCCTAACCATCCAGTTGATCC |
| | AGATGACCGAATATAAGCTCGTGGTAGTCGGAGCGGTGGGCGTTGGCAAGTCAGCGCTAACAATACAACTAAT |
| | CCAAATGACCGAATACAAGCTAGTTGTAGTCGGTGCCGTCGGCGTTGGAAAGTCAGCCCTTACAATTCAGCTCA |
| | TTCAG |
| | (KRAS G12V 25 mer\hat{ }3 nucleotide sequence) |
| 190 | ATGACCGAGTACAAGCTCGTAGTGGTTGGCGCCGGCGACGTGGGCAAGAGCGCCCTAACCATCCAGCTCATCC |
| | AGATGACAGAATATAAGCTTGTGGTTGTGGGAGCAGGAGACGTGGGAAAGAGTGCGTTGACGATTCAACTCA |
| | TACAGATGACCGAATACAAGTTGGTGGTGGTCGGCGCAGGTGACGTTGGTAAGTCTGCACTAACTATACAACT |
| | GATCCAG |
| | (KRAS G13D25 mer\hat{ }3 nucleotide sequence) |
| 191 | ATGACCGAGTACAAGCTGGTGGTGGTGGGCGCCTGCGGCGTGGGCAAGAGCGCCCTGACCATCCAGCTGATC |
| | CAG |
| | (KRAS G12C25 mer nucleotide sequence) |
| 192 | ATGACCGAGTACAAGCTCGTGGTTGTTGGCGCCTGCGGCGTGGGCAAGAGCGCCCTCACCATCCAGCTCATCC |
| | AGATGACAGAGTATAAGTTAGTCGTTGTCGGAGCTTGCGGAGTTGGAAAGTCGGCGCTCACCATTCAACTCAT |
| | ACAAATGACAGAATATAAGTTAGTGGTGGTGGGTGCGTGTGGCGTTGGCAAGAGTGCGCTTACTATCCAGCTC |
| | ATTCAG |
| | (KRAS G12C25 mer\hat{ }3 nucleotide sequence) |
| 193 | ATGACCGAGTACAAGCTGGTGGTGGTGGGCGCCGGCGGCGTGGGCAAGAGCGCCCTGACCATCCAGCTGATC |
| | CAG |
| | (KRAS WT 25 mer nucleotide sequence) |
| 194 | GGGAAATAAGAGAGAAAAGAAGAGTAAGAAGAAATATAAGAGCCACC |
| | (5′ UTR sequence; no promoter) |
| 195 | MUEYKLVVVGADGVGKSALUIQLIQMUEYKLVVVGAVGVGKSALUIQLIQMUEYKLVVVGAGDVGKSALUIQLIQ |
| | (KRAS(G12D G12V G13D) 75 mer “3MUT” aa. seq) |
| 196 | ATGACCGAGTACAAGCTCGTTGTAGTCGGCGCCGACGGCGTGGGCAAGAGCGCCTTGACCATCCAGTTGATCC |
| | AGATGACCGAATATAAGTTGGTGGTGGTAGGCGCAGTGGGAGTTGGCAAGTCAGCACTCACAATTCAGCTCAT |
| | TCAAATGACAGAATACAAGTTAGTCGTTGTAGGAGCAGGCGACGTCGGCAAGAGTGCCTTAACCATTCAACTA |
| | ATCCAG |
| | (KRAS(G12D G12V G13D) 75 mer “3MUT” nt. seq) |
| 197 | MTEYKLVVVGADGVGKSALTIQLIQMTEYKLVVVGAVGVGKSALTIQLIQMTEYKLVVVGAGDVGKSALTIQLIQMT |
| | EYKLVVVGACGVGKSALTIQLIQ |
| | (KRAS(G12D G12V G13D G12C) 100 mer “4MUT” aa. seq) |
| 198 | ATGACCGAGTACAAGCTCGTGGTCGTCGGCGCCGACGGGGTAGGCAAGTCCGCTCTGACCATTCAGCTCATCC |
| | AGATGACGGAGTACAAACTCGTGGTAGTGGGAGCCGTGGGTGTGGGCAAGAGCGCGCTCACCATCCAACTCA |
| | TCCAAATGACCGAATATAAACTCGTCGTGGTGGGAGCCGGCGACGTGGGAAAGAGCGCCCTTACCATCCAGTT |
| | AATCCAGATGACAGAATACAAGCTGGTGGTGGTCGGTGCCTGCGGCGTGGGTAAGTCCGCCCTGACAATCCAG |
| | CTGATCCAG |
| | (KRAS(G12D G12V G13D G12C) 100 mer “4MUT” nt. seq) |
| 199 | ATGCCCCACAGTAGCCTCCACCCCAGCATCCCCTGCCCCAGAGGCCACGGCGCACAGAAGGCCGCCCTGGTGC |
| | TGCTGAGCGCCTGTCTGGTGACCCTGTGGGGTCTGGGCGAGCCCCCCGAGCACACCCTGCGGTACCTCGTGCT |
| | GCATCTGGCCAGCCTGCAGCTGGGCCTGCTGCTGAACGGCGTGTGCAGCCTGGCCGAAGAGCTGAGACACATC |
| | CACAGCAGATACAGAGGCTCCTACTGGAGAACCGTCAGAGCCTGCCTCGGCTGTCCCCTGAGAAGAGGCGCCC |
| | TGCTGCTCCTGAGCATCTACTTCTACTACAGCCTGCCCAACGCCGTGGGCCCCCCCTTCACCTGGATGCTGGCCC |
| | TGCTGGGCCTGAGCCAGGCCCTGAACATCCTGCTGGGCCTGAAGGGCTTGGCCCCCGCCGAGATCTCCGCCGT |
| | GTGCGAGAAGGGCAACTTCAACATGGCCCATGGCCTTGCCTGGTCCTACTACATCGGCTACCTGAGACTGATCC |
| | TGCCCGAGCTGCAGGCCAGAATCAGAACCTACAACCAGCACTACAACAACCTGCTGAGAGGCGCCGTGAGCCA |
| | AAGACTGTACATCCTGCTGCCCCTGGACTGCGGCGTGCCCGACAACCTTAGCATGGCCGACCCCAACATCAGAT |
| | TCCTGGACAAGCTGCCCCAGCAGACCGGCGACCACGCCGGCATCAAGGACAGAGTGTACAGCAACAGCATCTA |
| | CGAGCTGCTGGAGAACGGCCAGAGAGCCGGCACCTGCGTGCTGGAGTACGCCACCCCCCTGCAGACCCTGTTC |
| | GCCATGAGCCAGTACAGCCAGGCCGGCTTCAGCAGAGAGGACAGACTGGAGCAAGCCAAGCTGTTCTGCAGA |
| | ACCCTGGAGGACATCCTGGCGGACGCCCCCGAGAGCCAAAACAACTGCAGACTGATCGCCTACCAGGAGCCCG |
| | CCGACGACAGCAGCTTCAGCCTGAGCCAGGAAGTGCTGAGACACCTGAGACAGGAAGAGAAGGAGGAGGTG |
| | ACCGTGGGAAGCCTGAAGACCAGCGCCGTGCCCAGCACCAGCACCATGAGCCAGGAGCCCGAGCTGCTGATC |
| | AGCGGCATGGAGAAGCCCCTGCCCCTGAGAACCGACTTCAGC |
| | (huSTING(V155M); no epitope tag; nucleotide sequence) |
| 200 | ATGCCTCACAGCAGCCTGCACCCTAGCATCCCTTGCCCTAGAGGCCACGGCGCCCAGAAGGCCGCCCTGGTGCT |
| | GCTGAGCGCCTGCCTGGTGACCCTGTGGGGCCTGGGCGAGCCTCCTGAGCACACCCTGAGATACCTGGTGCTG |
| | CACCTGGCCAGCCTGCAGCTGGGCCTGCTGCTGAACGGCGTGTGCAGCCTGGCCGAGGAGCTGAGACACATCC |
| | ACAGCAGATACAGAGGCAGCTACTGGAGAACCGTGAGAGCCTGCCTGGGCTGCCCTCTGAGAAGAGGCGCCC |
| | TGCTGCTGCTGAGCATCTACTTCTACTACAGCCTGCCTAACGCCGTGGGCCCTCCTTTCACCTGGATGCTGGCCC |
| | TGCTGGGCCTGAGCCAGGCCCTGAACATCCTGCTGGGCCTGAAGGGCCTGGCCCCTGCCGAGATCAGCGCCGT |
| | GTGCGAGAAGGGCAACTTCAACGTGGCCCACGGCCTGGCCTGGAGCTACTACATCGGCTACCTGAGACTGATC |
| | CTGCCTGAGCTGCAGGCCAGAATCAGAACCTACAACCAGCACTACAACAACCTGCTGAGAGGCGCCGTGAGCC |
| | AGAGACTGTACATCCTGCTGCCTCTGGACTGCGGCGTGCCTGACAACCTGAGCATGGCCGACCCTAACATCAGA |
| | TTCCTGGACAAGCTGCCTCAGCAGACCGGCGACCACGCCGGCATCAAGGACAGAGTGTACAGCAACAGCATCT |
| | ACGAGCTGCTGGAGAACGGCCAGAGAGCCGGCACCTGCGTGCTGGAGTACGCCACCCCTCTGCAGACCCTGTT |
| | CGCCATGAGCCAGTACAGCCAGGCCGGCTTCAGCAGAGAGGACACCCTGGAGCAGGCCAAGCTGTTCTGCAG |
| | AACCCTGGAGGACATCCTGGCCGACGCCCCTGAGAGCCAGAACAACTGCAGACTGATCGCCTACCAGGAGCCT |
| | GCCGACGACAGCAGCTTCAGCCTGAGCCAGGAGGTGCTGAGACACCTGAGACAGGAGGAGAAGGAGGAGGT |
| | GACCGTGGGCAGCCTGAAGACCAGCGCCGTGCCTAGCACCAGCACCATGAGCCAGGAGCCTGAGCTGCTGAT |
| | CAGCGGCATGGAGAAGCCTCTGCCTCTGAGAACCGACTTCAGC |
| | (HuSTING(R284T); no epitope tag; nucleotide sequence) |
| 201 | ATGCCCCACAGCAGCCTGCACCCCTCCATCCCCTGTCCCAGAGGCCACGGCGCCCAGAAGGCCGCCCTGGTGCT |
| | GCTGAGCGCCTGCCTGGTGACCTTATGGGGCCTGGGCGAGCCCCCCGAGCACACCCTGAGATACCTGGTCCTG |
| | CACCTGGCCAGCCTCCAGCTGGGCCTGCTGCTCAACGGCGTGTGTAGCCTGGCCGAGGAGCTGAGACACATCC |
| | ACAGCAGATACAGAGGCAGCTACTGGAGAACCGTGAGAGCCTGCCTGGGTTGCCCACTGAGAAGAGGAGCTC |
| | TGCTGCTGCTGAGCATCTACTTCTACTACTCGCTGCCCAACGCTGTGGGCCCCCCCTTCACCTGGATGCTGGCCC |
| | TGCTGGGTCTGAGCCAGGCCCTGAACATCCTCCTGGGCCTGAAGGGCCTGGCCCCCGCCGAGATAAGCGCCGT |
| | TTGCGAGAAGGGCAACTTCAACGTGGCCCATGGCCTGGCCTGGAGCTACTACATCGGCTACTTACGCCTGATCC |
| | TGCCCGAGCTGCAGGCCAGAATCAGAACCTACAACCAGCATTACAACAACCTGCTGAGAGGCGCCGTGAGCCA |
| | GAGACTGTATATCCTGCTGCCCCTGGACTGCGGCGTGCCCGACAACCTGAGCATGGCCGACCCCAACATCAGAT |
| | TCCTGGACAAGCTCCCCCAGCAGACCGGCGACCACGCCGGAATCAAAGACAGAGTGTATAGCAACAGCATCTA |
| | CGAGCTGCTGGAGAACGGCCAGAGAGCCGGCACCTGCGTACTGGAGTACGCCACCCCCTTGCAGACCCTGTTT |
| | GCCATGAGCCAGTACAGCCAGGCCGGCTTCAGCAGAGAGGACATGCTGGAGCAGGCCAAGCTGTTCTGCAGA |
| | ACCCTGGAGGACATCCTGGCCGACGCCCCCGAGAGCCAGAACAACTGCAGACTGATCGCCTACCAAGAGCCCG |
| | CCGACGACAGCAGCTTCAGCTTAAGCCAGGAGGTGCTGAGACATCTGAGACAGGAGGAGAAGGAGGAGGTG |
| | ACCGTGGGCAGCCTCAAGACCAGCGCTGTGCCCTCTACCAGCACCATGAGCCAGGAGCCCGAGCTGCTGATCA |
| | GCGGCATGGAGAAGCCCCTGCCCCTGAGAACAGACTTCAGC |
| | (hu STING(R284N); no epitope tag; nucleotide sequence) |
| 202 | ATGCCCCATAGCAGCCTGCACCCCAGCATCCCCTGCCCCAGAGGCCACGGCGCCCAGAAGGCCGCCCTGGTCCT |
| | GCTGAGCGCATGCCTGGTCACCCTGTGGGGCCTGGGCGAGCCCCCCGAGCACACCCTGAGATACCTGGTGCTG |
| | CACCTCGCCAGCCTGCAGCTGGGCCTGCTGCTGAACGGCGTGTGCAGCCTGGCCGAGGAGCTGAGACACATCC |
| | ACAGCAGATATAGAGGCAGCTACTGGAGAACCGTGAGAGCTTGCCTCGGCTGCCCCCTGAGAAGAGGCGCCC |
| | TGCTGCTGCTGAGCATCTACTTTTACTACAGCCTGCCCAACGCTGTGGGCCCCCCTTTCACGTGGATGCTCGCCC |
| | TGCTGGGACTGAGCCAGGCCCTGAACATCCTGCTGGGCCTTAAGGGCCTAGCCCCCGCCGAGATCAGCGCCGT |
| | GTGCGAGAAGGGCAACTTCAATGTGGCCCACGGCCTGGCCTGGAGCTACTACATCGGCTACCTGAGACTGATC |
| | CTGCCCGAGCTGCAGGCCAGAATCAGAACCTACAATCAGCACTACAACAACCTGCTGAGAGGCGCCGTGAGCC |
| | AGAGACTGTACATCCTGCTGCCCCTGGACTGCGGCGTGCCCGACAACCTCAGCATGGCCGACCCCAACATCAG |
| | ATTCCTGGACAAGCTGCCCCAGCAGACCGGCGACCACGCCGGCATCAAGGATCGCGTGTACAGCAACAGCATC |
| | TACGAGCTGCTGGAAAACGGCCAGAGAGCCGGAACCTGCGTGCTGGAGTACGCCACACCCCTGCAGACCCTGT |
| | TCGCCATGAGCCAGTACAGCCAGGCCGGCTTCAGCAGAGAGGACAAGCTGGAGCAGGCCAAGCTGTTCTGCA |
| | GAACCCTGGAGGATATCCTCGCCGACGCCCCCGAGAGCCAGAACAACTGCAGGCTGATCGCGTACCAGGAGCC |
| | CGCTGACGACAGCAGCTTTAGCCTGAGCCAGGAGGTGCTGAGACATCTGCGTCAAGAGGAAAAGGAGGAGGT |
| | GACCGTGGGCTCCCTGAAGACCAGCGCCGTGCCCAGCACCAGCACCATGAGCCAGGAGCCCGAGCTGCTGATC |
| | AGCGGCATGGAGAAGCCACTGCCCCTCAGAACCGACTTCAGC |
| | (Hu STING (R284K); no epitope tag; nucleotide sequence) |
| 203 | ATGCCTCACAGCAGCCTGCACCCTAGCATCCCTTGCCCTAGAGGCCACGGCGCCCAGAAGGCCGCCCTGGTGCT |
| | GCTGAGCGCCTGCCTGGTGACCCTGTGGGGCCTGGGCGAGCCTCCTGAGCACACCCTGAGATACCTGGTGCTG |
| | CACCTGGCCAGCCTGCAGCTGGGCCTGCTGCTGAACGGCGTGTGCAGCCTGGCCGAGGAGCTGAGACACATCC |
| | ACAGCAGATACAGAGGCAGCTACTGGAGAACCGTGAGAGCCTGCCTGGGCTGCCCTCTGAGAAGAGGCGCCC |
| | TGCTGCTGCTGAGCATCTACTTCTACTACAGCCTGCCTAACGCCGTGGGCCCTCCTTTCACCTGGATGCTGGCCC |
| | TGCTGGGCCTGAGCCAGGCCCTGAACATCCTGCTGGGCCTGAAGGGCCTGGCCCCTGCCGAGATCAGCGCCGT |
| | GTGCGAGAAGGGCAACTTCAGCGTGGCCCACGGCCTGGCCTGGAGCTACTACATCGGCTACCTGAGACTGATC |
| | CTGCCTGAGCTGCAGGCCAGAATCAGAACCTACAACCAGCACTACAACAACCTGCTGAGAGGCGCCGTGAGCC |
| | AGAGACTGTACATCCTGCTGCCTCTGGACTGCGGCGTGCCTGACAACCTGAGCATGGCCGACCCTAACATCAGA |
| | TTCCTGGACAAGCTGCCTCAGCAGACCGGCGACCACGCCGGCATCAAGGACAGAGTGTACAGCAACAGCATCT |
| | ACGAGCTGCTGGAGAACGGCCAGAGAGCCGGCACCTGCGTGCTGGAGTACGCCACCCCTCTGCAGACCCTGTT |
| | CGCCATGAGCCAGTACAGCCAGGCCGGCTTCAGCAGAGAGGACAGACTGGAGCAGGCCAAGCTGTTCTGCAG |
| | AACCCTGGAGGACATCCTGGCCGACGCCCCTGAGAGCCAGAACAACTGCAGACTGATCGCCTACCAGGAGCCT |
| | GCCGACGACAGCAGCTTCAGCCTGAGCCAGGAGGTGCTGAGACACCTGAGACAGGAGGAGAAGGAGGAGGT |
| | GACCGTGGGCAGCCTGAAGACCAGCGCCGTGCCTAGCACCAGCACCATGAGCCAGGAGCCTGAGCTGCTGAT |
| | CAGCGGCATGGAGAAGCCTCTGCCTCTGAGAACCGACTTCAGC |
| | (Hu STING(N154S); no epitope tag; nucleotide sequence) |
| 204 | ATGCCTCACAGCAGCCTGCACCCTAGCATCCCTTGCCCTAGAGGCCACGGCGCCCAGAAGGCCGCCCTGGTGCT |
| | GCTGAGCGCCTGCCTGGTGACCCTGTGGGGCCTGGGCGAGCCTCCTGAGCACACCCTGAGATACCTGGTGCTG |
| | CACCTGGCCAGCCTGCAGCTGGGCCTGCTGCTGAACGGCGTGTGCAGCCTGGCCGAGGAGCTGAGACACATCC |
| | ACAGCAGATACAGAGGCAGCTACTGGAGAACCGTGAGAGCCTGCCTGGGCTGCCCTCTGAGAAGAGGCGCCC |
| | TGCTGCTGCTGAGCATCTACTTCTACTACAGCCTGCCTAACGCCGTGGGCCCTCCTTTCACCTGGATGCTGGCCC |
| | TGCTGGGCCTGAGCCAGGCCCTGAACATCCTGCTGGGCCTGAAGGGCCTGGCCCCTGCCGAGATCAGCGCCCT |
| | GTGCGAGAAGGGCAACTTCAACGTGGCCCACGGCCTGGCCTGGAGCTACTACATCGGCTACCTGAGACTGATC |
| | CTGCCTGAGCTGCAGGCCAGAATCAGAACCTACAACCAGCACTACAACAACCTGCTGAGAGGCGCCGTGAGCC |
| | AGAGACTGTACATCCTGCTGCCTCTGGACTGCGGCGTGCCTGACAACCTGAGCATGGCCGACCCTAACATCAGA |
| | TTCCTGGACAAGCTGCCTCAGCAGACCGGCGACCACGCCGGCATCAAGGACAGAGTGTACAGCAACAGCATCT |
| | ACGAGCTGCTGGAGAACGGCCAGAGAGCCGGCACCTGCGTGCTGGAGTACGCCACCCCTCTGCAGACCCTGTT |
| | CGCCATGAGCCAGTACAGCCAGGCCGGCTTCAGCAGAGAGGACAGACTGGAGCAGGCCAAGCTGTTCTGCAG |
| | AACCCTGGAGGACATCCTGGCCGACGCCCCTGAGAGCCAGAACAACTGCAGACTGATCGCCTACCAGGAGCCT |
| | GCCGACGACAGCAGCTTCAGCCTGAGCCAGGAGGTGCTGAGACACCTGAGACAGGAGGAGAAGGAGGAGGT |
| | GACCGTGGGCAGCCTGAAGACCAGCGCCGTGCCTAGCACCAGCACCATGAGCCAGGAGCCTGAGCTGCTGAT |
| | CAGCGGCATGGAGAAGCCTCTGCCTCTGAGAACCGACTTCAGC |
| | (Hu STING(V147L); no epitope tag; nucleotide sequence) |
| 205 | ATGCCTCACAGCAGCCTGCACCCTAGCATCCCTTGCCCTAGAGGCCACGGCGCCCAGAAGGCCGCCCTGGTGCT |
| | GCTGAGCGCCTGCCTGGTGACCCTGTGGGGCCTGGGCGAGCCTCCTGAGCACACCCTGAGATACCTGGTGCTG |
| | CACCTGGCCAGCCTGCAGCTGGGCCTGCTGCTGAACGGCGTGTGCAGCCTGGCCGAGGAGCTGAGACACATCC |
| | ACAGCAGATACAGAGGCAGCTACTGGAGAACCGTGAGAGCCTGCCTGGGCTGCCCTCTGAGAAGAGGCGCCC |
| | TGCTGCTGCTGAGCATCTACTTCTACTACAGCCTGCCTAACGCCGTGGGCCCTCCTTTCACCTGGATGCTGGCCC |
| | TGCTGGGCCTGAGCCAGGCCCTGAACATCCTGCTGGGCCTGAAGGGCCTGGCCCCTGCCGAGATCAGCGCCGT |
| | GTGCGAGAAGGGCAACTTCAACGTGGCCCACGGCCTGGCCTGGAGCTACTACATCGGCTACCTGAGACTGATC |
| | CTGCCTGAGCTGCAGGCCAGAATCAGAACCTACAACCAGCACTACAACAACCTGCTGAGAGGCGCCGTGAGCC |
| | AGAGACTGTACATCCTGCTGCCTCTGGACTGCGGCGTGCCTGACAACCTGAGCATGGCCGACCCTAACATCAGA |
| | TTCCTGGACAAGCTGCCTCAGCAGACCGGCGACCACGCCGGCATCAAGGACAGAGTGTACAGCAACAGCATCT |
| | ACGAGCTGCTGGAGAACGGCCAGAGAGCCGGCACCTGCGTGCTGGAGTACGCCACCCCTCTGCAGACCCTGTT |
| | CGCCATGAGCCAGTACAGCCAGGCCGGCTTCAGCAGAGAGGACAGACTGGAGCAGGCCAAGCTGTTCTGCAG |
| | AACCCTGGAGGACATCCTGGCCGACGCCCCTGAGAGCCAGAACAACTGCAGACTGATCGCCTACCAGCAGCCT |
| | GCCGACGACAGCAGCTTCAGCCTGAGCCAGGAGGTGCTGAGACACCTGAGACAGGAGGAGAAGGAGGAGGT |
| | GACCGTGGGCAGCCTGAAGACCAGCGCCGTGCCTAGCACCAGCACCATGAGCCAGGAGCCTGAGCTGCTGAT |
| | CAGCGGCATGGAGAAGCCTCTGCCTCTGAGAACCGACTTCAGC |
| | (Hu STING (E315Q); no epitope tag; nucleotide sequence) |
| 206 | ATGCCTCACAGCAGCCTGCACCCTAGCATCCCTTGCCCTAGAGGCCACGGCGCCCAGAAGGCCGCCCTGGTGCT |
| | GCTGAGCGCCTGCCTGGTGACCCTGTGGGGCCTGGGCGAGCCTCCTGAGCACACCCTGAGATACCTGGTGCTG |
| | CACCTGGCCAGCCTGCAGCTGGGCCTGCTGCTGAACGGCGTGTGCAGCCTGGCCGAGGAGCTGAGACACATCC |
| | ACAGCAGATACAGAGGCAGCTACTGGAGAACCGTGAGAGCCTGCCTGGGCTGCCCTCTGAGAAGAGGCGCCC |
| | TGCTGCTGCTGAGCATCTACTTCTACTACAGCCTGCCTAACGCCGTGGGCCCTCCTTTCACCTGGATGCTGGCCC |
| | TGCTGGGCCTGAGCCAGGCCCTGAACATCCTGCTGGGCCTGAAGGGCCTGGCCCCTGCCGAGATCAGCGCCGT |
| | GTGCGAGAAGGGCAACTTCAACGTGGCCCACGGCCTGGCCTGGAGCTACTACATCGGCTACCTGAGACTGATC |
| | CTGCCTGAGCTGCAGGCCAGAATCAGAACCTACAACCAGCACTACAACAACCTGCTGAGAGGCGCCGTGAGCC |
| | AGAGACTGTACATCCTGCTGCCTCTGGACTGCGGCGTGCCTGACAACCTGAGCATGGCCGACCCTAACATCAGA |
| | TTCCTGGACAAGCTGCCTCAGCAGACCGGCGACCACGCCGGCATCAAGGACAGAGTGTACAGCAACAGCATCT |
| | ACGAGCTGCTGGAGAACGGCCAGAGAGCCGGCACCTGCGTGCTGGAGTACGCCACCCCTCTGCAGACCCTGTT |
| | CGCCATGAGCCAGTACAGCCAGGCCGGCTTCAGCAGAGAGGACAGACTGGAGCAGGCCAAGCTGTTCTGCAG |
| | AACCCTGGAGGACATCCTGGCCGACGCCCCTGAGAGCCAGAACAACTGCAGACTGATCGCCTACCAGGAGCCT |
| | GCCGACGACAGCAGCTTCAGCCTGAGCCAGGAGGTGCTGAGACACCTGAGACAGGAGGAGAAGGAGGAGGT |
| | GACCGTGGGCAGCCTGAAGACCAGCGCCGTGCCTAGCACCAGCACCATGAGCCAGGAGCCTGAGCTGCTGAT |
| | CAGCGGCATGGAGAAGCCTCTGCCTCTGGCCACCGACTTCAGC |
| | (Hu STING (R375A) no epitope tag; nucleotide sequence) |
| 207 | ATGCCTCACAGCAGCCTGCACCCTAGCATCCCTTGCCCTAGAGGCCACGGCGCCCAGAAGGCCGCCCTGGTGCT |
| | GCTGAGCGCCTGCCTGGTGACCCTGTGGGGCCTGGGCGAGCCTCCTGAGCACACCCTGAGATACCTGGTGCTG |
| | CACCTGGCCAGCCTGCAGCTGGGCCTGCTGCTGAACGGCGTGTGCAGCCTGGCCGAGGAGCTGAGACACATCC |
| | ACAGCAGATACAGAGGCAGCTACTGGAGAACCGTGAGAGCCTGCCTGGGCTGCCCTCTGAGAAGAGGCGCCC |
| | TGCTGCTGCTGAGCATCTACTTCTACTACAGCCTGCCTAACGCCGTGGGCCCTCCTTTCACCTGGATGCTGGCCC |
| | TGCTGGGCCTGAGCCAGGCCCTGAACATCCTGCTGGGCCTGAAGGGCCTGGCCCCTGCCGAGATCAGCGCCCT |
| | GTGCGAGAAGGGCAACTTCAGCATGGCCCACGGCCTGGCCTGGAGCTACTACATCGGCTACCTGAGACTGATC |
| | CTGCCTGAGCTGCAGGCCAGAATCAGAACCTACAACCAGCACTACAACAACCTGCTGAGAGGCGCCGTGAGCC |
| | AGAGACTGTACATCCTGCTGCCTCTGGACTGCGGCGTGCCTGACAACCTGAGCATGGCCGACCCTAACATCAGA |
| | TTCCTGGACAAGCTGCCTCAGCAGACCGGCGACCACGCCGGCATCAAGGACAGAGTGTACAGCAACAGCATCT |
| | ACGAGCTGCTGGAGAACGGCCAGAGAGCCGGCACCTGCGTGCTGGAGTACGCCACCCCTCTGCAGACCCTGTT |
| | CGCCATGAGCCAGTACAGCCAGGCCGGCTTCAGCAGAGAGGACAGACTGGAGCAGGCCAAGCTGTTCTGCAG |
| | AACCCTGGAGGACATCCTGGCCGACGCCCCTGAGAGCCAGAACAACTGCAGACTGATCGCCTACCAGGAGCCT |
| | GCCGACGACAGCAGCTTCAGCCTGAGCCAGGAGGTGCTGAGACACCTGAGACAGGAGGAGAAGGAGGAGGT |
| | GACCGTGGGCAGCCTGAAGACCAGCGCCGTGCCTAGCACCAGCACCATGAGCCAGGAGCCTGAGCTGCTGAT |
| | CAGCGGCATGGAGAAGCCTCTGCCTCTGAGAACCGACTTCAGC |
| | (Hu STING(V147L/N154S/V155M); no epitope tag; nucleotide sequence) |
| 208 | ATGCCTCACAGCAGCCTGCACCCTAGCATCCCTTGCCCTAGAGGCCACGGCGCCCAGAAGGCCGCCCTGGTGCT |
| | GCTGAGCGCCTGCCTGGTGACCCTGTGGGGCCTGGGCGAGCCTCCTGAGCACACCCTGAGATACCTGGTGCTG |
| | CACCTGGCCAGCCTGCAGCTGGGCCTGCTGCTGAACGGCGTGTGCAGCCTGGCCGAGGAGCTGAGACACATCC |
| | ACAGCAGATACAGAGGCAGCTACTGGAGAACCGTGAGAGCCTGCCTGGGCTGCCCTCTGAGAAGAGGCGCCC |
| | TGCTGCTGCTGAGCATCTACTTCTACTACAGCCTGCCTAACGCCGTGGGCCCTCCTTTCACCTGGATGCTGGCCC |
| | TGCTGGGCCTGAGCCAGGCCCTGAACATCCTGCTGGGCCTGAAGGGCCTGGCCCCTGCCGAGATCAGCGCCCT |
| | GTGCGAGAAGGGCAACTTCAGCATGGCCCACGGCCTGGCCTGGAGCTACTACATCGGCTACCTGAGACTGATC |
| | CTGCCTGAGCTGCAGGCCAGAATCAGAACCTACAACCAGCACTACAACAACCTGCTGAGAGGCGCCGTGAGCC |
| | AGAGACTGTACATCCTGCTGCCTCTGGACTGCGGCGTGCCTGACAACCTGAGCATGGCCGACCCTAACATCAGA |
| | TTCCTGGACAAGCTGCCTCAGCAGACCGGCGACCACGCCGGCATCAAGGACAGAGTGTACAGCAACAGCATCT |
| | ACGAGCTGCTGGAGAACGGCCAGAGAGCCGGCACCTGCGTGCTGGAGTACGCCACCCCTCTGCAGACCCTGTT |
| | CGCCATGAGCCAGTACAGCCAGGCCGGCTTCAGCAGAGAGGACATGCTGGAGCAGGCCAAGCTGTTCTGCAG |
| | AACCCTGGAGGACATCCTGGCCGACGCCCCTGAGAGCCAGAACAACTGCAGACTGATCGCCTACCAGGAGCCT |
| | GCCGACGACAGCAGCTTCAGCCTGAGCCAGGAGGTGCTGAGACACCTGAGACAGGAGGAGAAGGAGGAGGT |
| | GACCGTGGGCAGCCTGAAGACCAGCGCCGTGCCTAGCACCAGCACCATGAGCCAGGAGCCTGAGCTGCTGAT |
| | CAGCGGCATGGAGAAGCCTCTGCCTCTGAGAACCGACTTCAGC |
| | (Hu STING(R284M/V147L/N154S/V155M); no epitope tag; nucleotide sequence) |
| 209 | TGATAATAGGCTGGAGCCTCGGTGGCCTAGCTTCTTGCCCCTTGGGCCTCCCCCCAGCCCCTCCTCCCCTTCCTG |
| | CACCCGTACCCCCCAAACACCATTGTCACACTCCAGTGGTCTTTGAATAAAGTCTGAGTGGGCGGC |
| | (3′ UTR used in STING V155M construct, containing miR122 binding site) |
| 210 | ATGGAGACCCCCAAGCCTAGAATCCTGCCCTGGCTGGTGAGCCAGCTGGACCTGGGCCAGCTGGAGGGCGTA |
| | GCCTGGCTGGACGAGAGCAGAACCAGATTCAGAATCCCCTGGAAGCACGGCCTGAGACAAGACGCCCAGATG |
| | GCCGACTTCGGCATCTTCCAGGCCTGGGCCGAGGCCAGCGGCGCCTACACCCCTGGCAAGGATAAGCCCGATG |
| | TGAGCACCTGGAAGAGAAACTTCAGAAGCGCCCTGAACAGAAAGGAGGTGCTGAGACTGGCCGCCGACAATA |
| | GCAAGGACCCCTACGACCCCCACAAGGTGTACGAGTTCGTTACCCCCGGCGCCAGGGACTTCGTGCACCTGGG |
| | CGCCAGCCCCGACACCAACGGCAAGAGCAGCCTGCCCCACAGCCAGGAGAACCTGCCCAAGCTGTTCGATGGC |
| | CTGATCCTGGGCCCCCTGAAGGACGAGGGCAGCAGCGACCTGGCCATCGTGAGCGACCCTAGCCAGCAGCTG |
| | CCCTCCCCCAACGTGAACAACTTCCTGAACCCCGCCCCCCAGGAGAACCCCCTGAAGCAACTGCTGGCCGAGGA |
| | GCAGTGGGAGTTCGAGGTGACCGCCTTCTACAGAGGCAGACAGGTGTTCCAGCAGACCCTGTTCTGCCCCGGC |
| | GGCCTGAGACTGGTAGGCAGCACCGCTGACATGACCCTGCCCTGGCAGCCCGTGACCCTGCCCGACCCCGAAG |
| | GCTTTCTGACCGACAAGCTGGTGAAGGAGTACGTCGGCCAAGTGCTGAAGGGCCTGGGCAACGGCCTGGCCC |
| | TGTGGCAGGCCGGCCAGTGCCTGTGGGCCCAGAGACTCGGCCACAGCCACGCCTTCTGGGCCCTGGGCGAGG |
| | AACTCCTGCCCGATAGCGGCAGAGGCCCCGACGGCGAGGTGCACAAGGACAAGGACGGCGCCGTGTTCGACC |
| | TGCGCCCCTTCGTGGCCGACCTGATCGCCTTCATGGAGGGCAGCGGCCACAGCCCCAGATATACCCTGTGGTTC |
| | TGCATGGGCGAGATGTGGCCCCAGGACCAGCCCTGGGTGAAGAGACTGGTGATGGTGAAGGTGGTGCCCACC |
| | TGCCTGAAAGAGCTGCTGGAGATGGCCAGAGAGGGCGGCGCCAGCTCCCTGAAAACCGTGGACCTGCACATT |
| | GACAACAGCCAGCCCATCAGCCTGACCAGCGACCAGTACAAGGCCTACCTGCAGGACCTGGTGGAGGACATG |
| | GACTTCCAGGCCACCGGCAACATC |
| | (super mouse IRF3 S396D; no epitope tag) |
| 211 | ATGGGCACCCCCAAGCCCAGAATCCTGCCCTGGCTGGTGAGCCAGCTGGACCTGGGCCAGCTGGAGGGAGTG |
| | GCCTGGGTGAACAAGAGCAGAACCAGATTCAGAATCCCCTGGAAGCACGGCCTCAGACAGGACGCCCAGCAG |
| | GAGGACTTCGGCATTTTTCAGGCTTGGGCCGAGGCCACCGGCGCCTACGTGCCCGGCAGAGACAAGCCCGACC |
| | TGCCCACCTGGAAAAGAAACTTCAGAAGCGCCTTGAATAGAAAGGAGGGCCTGAGACTGGCCGAGGACAGAA |
| | GCAAGGACCCCCACGACCCTCACAAGATCTACGAGTTCGTGAATAGCGGCGTGGGCGACTTTAGCCAGCCCGA |
| | CACCAGCCCCGACACCAACGGCGGCGGCAGCACCAGCGACACGCAGGAGGACATCCTGGATGAACTGCTGGG |
| | CAACATGGTGCTGGCCCCCCTGCCCGATCCCGGCCCCCCTTCGCTTGCCGTGGCCCCCGAGCCCTGCCCCCAGC |
| | CCCTGAGAAGCCCCTCTCTGGATAACCCCACCCCCTTCCCCAACCTGGGCCCCAGCGAGAATCCACTGAAGAGA |
| | CTTCTGGTCCCCGGCGAGGAGTGGGAGTTCGAGGTGACCGCCTTCTACAGAGGCAGACAGGTGTTCCAGCAG |
| | ACCATCAGCTGCCCCGAAGGCCTGAGATTAGTGGGCAGCGAAGTGGGCGACAGGACCCTGCCCGGGTGGCCC |
| | GTGACCCTGCCCGATCCCGGCATGAGCCTGACCGACAGAGGTGTGATGAGCTACGTGAGACACGTGCTGAGCT |
| | GCCTGGGCGGCGGCCTGGCACTGTGGAGAGCCGGCCAGTGGCTGTGGGCCCAGAGACTGGGCCACTGCCACA |
| | CCTACTGGGCCGTGAGCGAGGAGCTGCTGCCCAACAGCGGCCACGGCCCCGACGGCGAGGTGCCCAAGGACA |
| | AGGAAGGGGGCGTGTTCGACCTGGGCCCCTTCATCGTAGACCTGATCACCTTTACCGAGGGCAGCGGCAGGA |
| | GCCCCAGATACGCCCTGTGGTTCTGCGTGGGCGAAAGCTGGCCCCAGGACCAGCCCTGGACCAAGAGACTGGT |
| | GATGGTGAAGGTAGTGCCCACCTGCCTGAGAGCCTTAGTGGAGATGGCCAGAGTGGGCGGGGCCAGCAGCCT |
| | GGAGAACACCGTGGATCTTCACATCGACAACAGCCACCCCCTGAGCCTGACCAGCGACCAGTACAAGGCCTAC |
| | CTGCAGGACCTGGTGGAGGGCATGGACTTCCAGGGCCCCGGCGAGACC |
| | (super human IRF3 S396D; no epitope tag) |
| 212 | ATGGCGCTGGCCCCCGAAAGAGCCGCCCCCAGAGTCCTCTTCGGCGAATGGCTCCTTGGCGAAATTTCGTCGG |
| | GCTGCTACGAGGGCTTACAATGGCTGGATGAGGCGAGAACCTGTTTCAGGGTGCCCTGGAAACACTTCGCCAG |
| | AAAGGATCTAAGCGAAGCAGATGCTAGAATTTTTAAGGCTTGGGCCGTGGCCAGGGGAAGATGGCCCCCCTC |
| | GAGCAGAGGCGGCGGCCCTCCCCCCGAGGCAGAAACGGCCGAGAGAGCCGGATGGAAAACCAATTTCAGAT |
| | GCGCCCTGAGATCTACAAGAAGATTCGTGATGCTTAGAGACAACAGCGGAGATCCCGCCGATCCCCATAAGGT |
| | GTATGCCCTGTCCCGGGAGCTGTGCTGGAGGGAAGGGCCTGGCACTGACCAGACCGAAGCCGAAGCCCCCGC |
| | GGCCGTGCCGCCGCCCCAAGGAGGCCCACCAGGCCCTTTCCTCGCTCACACCCACGCCGGTCTGCAAGCCCCG |
| | GGACCTCTACCTGCCCCTGCCGGCGATAAAGGCGACCTGTTGCTGCAGGCCGTCCAACAGAGCTGCCTGGCCG |
| | ATCATCTGCTCACAGCCAGCTGGGGCGCTGACCCCGTCCCAACAAAGGCCCCCGGTGAGGGCCAAGAAGGCCT |
| | GCCTCTGACCGGCGCCTGTGCCGGCGGCCCTGGCCTGCCTGCTGGCGAGCTGTACGGATGGGCTGTCGAAACC |
| | ACTCCCTCCCCCGGCCCCCAACCTGCGGCCCTGACAACCGGCGAGGCAGCCGCACCCGAAAGCCCCCACCAGG |
| | CCGAACCCTACCTCAGTCCCAGCCCCTCCGCCTGCACCGCTGTGCAGGAGCCCAGCCCCGGTGCTCTGGACGTA |
| | ACAATCATGTACAAAGGCAGAACCGTGCTTCAGAAGGTGGTTGGACACCCCTCCTGTACTTTTCTCTACGGCCC |
| | CCCCGACCCTGCCGTGAGAGCTACCGACCCGCAACAGGTGGCCTTTCCCTCGCCCGCCGAACTGCCCGATCAAA |
| | AACAGCTGAGATACACCGAGGAGCTGCTGAGACACGTGGCGCCGGGCTTACACCTAGAGTTGAGAGGCCCCC |
| | AACTCTGGGCCAGACGCATGGGCAAGTGTAAGGTGTACTGGGAGGTCGGGGGCCCTCCCGGCTCTGCCAGCC |
| | CCAGCACCCCTGCTTGTCTCTTGCCCAGAAACTGTGATACCCCCATCTTCGACTTCCGTGTATTTTTCCAGGAACT |
| | GGTCGAGTTTAGAGCCAGACAGAGACGAGGCAGCCCCAGATATACAATCTACCTCGGCTTCGGCCAGGACCTG |
| | AGTGCCGGCAGACCTAAGGAGAAGTCGCTGGTCCTAGTGAAGTTAGAGCCCTGGCTATGTAGAGTGCACCTG |
| | GAGGGCACCCAGAGAGAAGGAGTGAGCAGCCTGGACAGCAGCAGCCTGAGTCTGTGCCTGAGCTCCGCCAAC |
| | TCGCTGTATGATGACATCGAGTGTTTCCTCATGGAGCTGGAGCAGCCCGCC |
| | (Wild-type Hu IRF7 isoform A; P037 without epitope tag) |
| 213 | ATGGCCCTTGCCCCTGAGCGGGCCGCCCCCAGAGTGTTATTCGGCGAGTGGCTGCTGGGCGAGATCAGCAGCG |
| | GCTGCTACGAGGGACTGCAGTGGCTGGACGAGGCTAGAACCTGCTTCAGAGTGCCCTGGAAGCATTTCGCCAG |
| | AAAAGACCTGAGCGAGGCTGATGCTAGAATCTTCAAAGCCTGGGCTGTGGCCCGAGGAAGATGGCCCCCCAG |
| | CAGCAGAGGAGGCGGCCCTCCTCCCGAGGCCGAAACCGCAGAGCGTGCTGGCTGGAAAACCAACTTTAGGTG |
| | TGCCCTGAGGAGCACCAGAAGATTCGTTATGCTCAGAGACAACAGCGGGGACCCCGCCGACCCGCACAAGGT |
| | GTACGCCTTAAGTAGGGAGCTGTGCTGGAGAGAGGGACCGGGGACCGACCAAACCGAGGCTGAGGCGCCCG |
| | CCGCCGTTCCACCTCCCCAGGGTGGTCCCCCAGGGCCCTTTCTGGCACACACCCACGCCGGATTACAGGCGCCA |
| | GGGCCCTTACCCGCCCCCGCCGGAGACAAAGGCGACCTCCTGCTGCAAGCCGTGCAACAAAGCTGCCTGGCCG |
| | ATCACTTACTAACCGCTAGCTGGGGCGCCGATCCTGTTCCCACCAAGGCCCCCGGTGAAGGGCAAGAAGGACT |
| | GCCCTTAACCGGCGCCTGTGCCGGAGGCCCTGGTCTGCCAGCCGGCGAGCTGTACGGTTGGGCTGTCGAAACA |
| | ACACCCAGTCCGGGCCCACAGCCTGCCGCTCTGACCACCGGCGAAGCCGCCGCCCCCGAGAGCCCACACCAGG |
| | CTGAACCCTACCTGAGCCCCAGCCCCAGCGCCTGCACCGCTGTGCAGGAGCCTAGCCCCGGCGCTCTTGATGTG |
| | ACAATAATGTACAAGGGCAGGACCGTGCTGCAAAAGGTCGTGGGCCATCCGTCGTGTACCTTTCTGTACGGCC |
| | CTCCAGACCCCGCGGTTAGAGCCACCGACCCCCAGCAAGTCGCCTTCCCCTCCCCCGCCGAACTGCCCGACCAA |
| | AAGCAGCTGCGGTACACAGAAGAACTACTTAGACACGTGGCCCCCGGTCTGCACTTGGAGCTGAGAGGCCCCC |
| | AGCTCTGGGCCAGAAGAATGGGCAAGTGCAAAGTGTACTGGGAGGTGGGCGGCCCACCCGGCTCAGCTTCGC |
| | CCTCCACACCCGCATGCCTGCTGCCCAGAAATTGCGACACGCCCATCTTCGATTTTAGAGTGTTCTTTCAGGAGT |
| | TGGTGGAGTTCAGAGCCAGACAAAGACGCGGCAGCCCCAGATACACCATTTACCTCGGCTTCGGCCAGGACCT |
| | CAGCGCTGGCAGACCCAAGGAGAAGAGTCTGGTCCTCGTGAAGCTGGAGCCCTGGCTGTGCAGAGTGCACCT |
| | GGAGGGCACCCAGCGTGAAGGCGTGAGCAGCCTGGATTCAAGCGACCTGGACCTATGCCTAAGCAGCGCTAA |
| | CTCACTGTACGACGATATCGAATGCTTCCTGATGGAACTGGAGCAGCCTGCC |
| | (constitutively active Hu IRF7 S477D/S479D; P033 without epitope tag) |
| 214 | ATGGCCCTGGCACCCGAGAGGGCCGCCCCCAGGGTGCTCTTCGGCGAGTGGTTACTAGGCGAAATTAGCAGC |
| | GGCTGCTATGAAGGCCTTCAGTGGCTGGACGAGGCCAGAACCTGCTTTAGAGTTCCCTGGAAGCACTTCGCCC |
| | GGAAAGATCTCTCTGAAGCCGACGCCAGAATATTCAAGGCCTGGGCTGTCGCCAGGGGCAGGTGGCCACCCTC |
| | CAGCCGAGGTGGCGGCCCTCCCCCTGAGGCTGAGACTGCGGAAAGGGCGGGCTGGAAGACCAATTTCAGATG |
| | CGCTCTGAGAAGCACCAGACGTTTTGTGATGCTAAGAGACAATAGCGGCGATCCCGCCGACCCCCATAAGGTA |
| | TACGCACTGAGCCGAGAGCTCTGTTGGAGAGAAGGCCCCGGCACCGACCAGACCGAGGCTGAAGCCCCTGCA |
| | GCCGTGCCCCCCCCTCAAGGCGGGCCCCCCGGCCCCTTCCTGGCCCATACCCATGCAGGGTTACAAGCACCCGG |
| | GCCCTTGCCCGCCCCAGCGGGAGACAAGGGCGACCTCTTACTGCAGGCCGTGCAACAAAGTTGTCTGGCGGAC |
| | CACCTGCTGACCGCATCATGGGGCGCGGATCCTGTGCCCACCAAGGCACCCGGCGAAGGCCAGGAGGGCCTG |
| | CCCTTGACCGGCGCCTGCGCTGGCGGACCCGGCCTACCTGCTGGCGAACTGTATGGCTGGGCCGTAGAGACGA |
| | CTCCCAGCCCTGGCCCACAACCCGCGGCTTTGACCACCGGCGAAGCCGCCGCCCCCGAGTCTCCGCACCAGGCC |
| | GAGCCTTACCTCAGCCCAAGCCCTAGCGCCTGCACCGCCGTGCAAGAACCTAGCCCCGGAGCCCTGGATGTGA |
| | CAATCATGTACAAGGGTAGAACCGTACTGCAAAAGGTGGTGGGTCATCCCAGCTGCACCTTTCTTTACGGCCCA |
| | CCCGACCCTGCCGTGCGAGCCACAGACCCACAACAGGTCGCCTTCCCAAGCCCCGCCGAACTGCCCGATCAGA |
| | AACAGCTGAGATATACAGAGGAGCTTCTGCGGCACGTAGCTCCCGGCCTACATCTCGAGCTGAGGGGCCCACA |
| | ACTGTGGGCCAGACGCATGGGCAAATGCAAGGTCTACTGGGAAGTGGGAGGCCCCCCCGGCAGCGCATCTCC |
| | CAGCACGCCCGCGTGCCTGCTGCCTAGAAATTGCGACACCCCCATCTTTGACTTCCGGGTATTCTTTCAGGAGCT |
| | GGTAGAGTTCAGAGCCAGGCAGCGGAGGGGCTCCCCCAGATACACAATCTACCTGGGCTTCGGACAGGACCT |
| | GTCCGCCGGCCGCCCCAAGGAAAAGAGCCTGGTGCTGGTGAAGCTGGAGCCCTGGCTGTGTAGGGTACACCT |
| | CGAAGGCACCCAGAGAGAAGGAGTGAGCTCGCTTGATGACAGCGATCTGTCGGATTGCCTTAGCAGCGCCAA |
| | CAGCCTGTATGATGATATCGAGTGCTTCCTTATGGAACTGGAGCAGCCCGCC |
| | (constitutively active Hu IRF7 S475D/S477D/L480D; P034 without epitope tag) |
| 215 | ATGGCCCTAGCCCCCGAAAGAGCAGCTCCCAGAGTGCTGTTCGGCGAATGGCTGCTTGGCGAGATCAGCAGCG |
| | GCTGCTACGAAGGCCTGCAGTGGCTGGACGAAGCCCGCACCTGTTTCAGAGTGCCCTGGAAGCACTTCGCTAG |
| | AAAGGATTTGAGCGAGGCTGATGCTAGAATCTTTAAGGCTTGGGCTGTGGCAAGAGGCAGATGGCCGCCTAG |
| | TAGCAGAGGGGGCGGACCTCCCCCCGAGGCTGAGACCGCTGAGAGAGCAGGGTGGAAAACCAACTTCAGATG |
| | CGCGCTGAGAAGCACCCGAAGATTCGTGATGCTACGTGACAATAGCGGCGACCCCGCCGACCCCCACAAAGTG |
| | TACGCCCTGTCCCGAGAACTTTGCTGGAGAGAGGGACCCGGCACCGATCAAACAGAGGCTGAGGCCCCGGCC |
| | GCTGTACCCCCGCCCCAAGGAGGCCCCCCAGGCCCCTTTCTGGCTCATACACATGCCGGCCTGCAGGCACCCGG |
| | GCCCCTCCCGGCTCCTGCCGGCGACAAGGGCGATCTCCTTCTCCAGGCCGTGCAGCAGAGCTGCCTGGCCGAT |
| | CACCTGCTGACCGCCTCGTGGGGCGCCGACCCCGTGCCCACCAAAGCCCCGGGTGAAGGCCAAGAGGGGCTC |
| | CCTTTAACCGGAGCATGCGCCGGAGGCCCCGGCCTGCCAGCCGGCGAGTTATATGGCTGGGCTGTGGAGACC |
| | ACACCCTCCCCCGGCCCTCAACCCGCTGCCCTGACCACCGGTGAGGCCGCCGCCCCCGAGAGCCCACACCAGGC |
| | CGAACCCTACCTGAGCCCTAGCCCTAGCGCCTGCACCGCCGTGCAAGAACCCAGCCCCGGAGCCCTGGATGTG |
| | ACCATTATGTACAAGGGCCGGACAGTGCTGCAAAAGGTTGTGGGACACCCGAGCTGCACCTTTCTGTACGGTC |
| | CGCCTGACCCCGCCGTGAGAGCCACGGACCCGCAGCAGGTGGCCTTCCCCTCACCCGCGGAGCTGCCCGACCA |
| | AAAGCAACTCAGATACACAGAAGAACTATTGCGTCACGTCGCGCCCGGCCTGCATCTGGAGCTGAGAGGCCCC |
| | CAGCTCTGGGCCAGAAGGATGGGCAAATGCAAGGTGTACTGGGAGGTGGGAGGCCCCCCCGGCAGCGCCAG |
| | CCCCAGCACTCCCGCGTGCCTGCTGCCCAGAAATTGCGACACTCCCATCTTCGATTTCAGGGTGTTCTTCCAGGA |
| | GCTGGTGGAGTTCAGAGCCAGGCAGAGAAGGGGTAGCCCCAGATACACAATCTATCTAGGCTTTGGACAAGA |
| | TCTGAGCGCCGGCCGGCCTAAGGAAAAAAGCCTGGTGCTGGTAAAGCTGGAGCCGTGGCTTTGTAGAGTGCA |
| | CCTGGAGGGGACGCAGCGAGAGGGCGTGAGCAGCTTAGACGACGATGACTTGGATCTGTGTCTCGACAGCGC |
| | CAACGACTTGTACGACGACATCGAGTGCTTCCTGATGGAACTGGAGCAGCCCGCC |
| | (constitutively active Hu IRF7 S475D/S476D/S477D/S479D/S483D/S487D; P035 without |
| | epitope tag) |
| 216 | ATGGCCCTGGCCCCCGAGAGAGCCGCCCCCAGAGTGCTCTTCGGCGAGTGGCTGCTGGGCGAGATAAGCAGC |
| | GGCTGCTACGAAGGTCTGCAGTGGCTAGACGAGGCCAGAACCTGCTTTAGAGTGCCCTGGAAGCACTTCGCTC |
| | GAAAGGACCTGTCCGAGGCCGATGCTAGAATTTTTAAGGCTTGGGCCGTCGCTAGGGGAAGATGGCCCCCTAG |
| | CAGTAGAGGCGGCGGCCCCCCTCCCGAAGCCGAGACGGCCGAGAGGGCCGGCTGGAAAACCAATTTCAGATG |
| | CGCCCTGAGGAGCACCCGCAGGTTCGTAATGCTGCGAGACAATAGCGGCGATCCTGCGGATCCTCACAAGGTT |
| | TACGCCTTGAGTAGAGAACTGTGCTGGCGGGAGGGCCCCGGAACCGACCAGACGGAGGCAGAGGCACCCGCT |
| | GCCGTGCCCCCCCCTCAAGGAGGACCCCCTGGACCCTTTCTGGCCCACACCCACGCTGGTCTGCAGGCCCCAGG |
| | CCCACTGCCCGCCCCAGCGGGCGATAAGGGTGACCTGCTCCTACAGGCGGTGCAACAGAGCTGTCTGGCCGAC |
| | CACCTGTTGACCGCCAGCTGGGGGGCCGACCCGGTGCCCACCAAAGCTCCCGGAGAGGGCCAAGAAGGCCTC |
| | CCACTAACTGGCGCCTGCGCCGGGGGCCCGGGATTACCCGCCGGCGAGCTGTATGGCTGGGCCGTGGAGACC |
| | ACGCCCAGCCCCGAGGGCGTGTCGTCCCTGGACAGCAGCAGCCTGAGCCTGTGCCTGAGCTCCGCCAACAGCC |
| | TGTATGACGACATCGAGTGCTTCCTGATGGAGCTGGAACAACCCGCC |
| | (constitutively active truncated Hu IRF7 1-246 + 468-503; P032 without epitope tag) |
| 217 | ATGGCACTGGCGCCTGAAAGAGCCGCTCCGCGTGTGCTCTTCGGCGAGTGGCTGCTGGGCGAGATCAGCTCCG |
| | GCTGCTACGAGGGTCTACAGTGGCTGGACGAGGCCAGAACCTGTTTTAGAGTGCCCTGGAAGCACTTCGCGAG |
| | AAAGGACCTGAGCGAGGCCGACGCCAGAATCTTCAAAGCCTGGGCAGTGGCTAGGGGCAGATGGCCTCCCAG |
| | CAGCCGGGGCGGCGGCCCACCCCCCGAGGCCGAAACCGCCGAAAGAGCTGGCTGGAAGACCAACTTCAGATG |
| | CGCCCTGAGAAGCACCAGAAGATTTGTCATGCTGAGAGATAATTCAGGAGACCCCGCCGACCCTCACAAGGTG |
| | TACGCCCTGTCCAGAGAGCTGTGTTGGAGAGAGGGCCCCGGAACCGACCAGACCGAGGCCGAGGCTCCAGCT |
| | GCCGTGCCACCCCCCCAAGGCGGACCACCCGGCCCCTTCTTGGCACATACGCACGCCGGCCTCCAGGCTCCCGG |
| | CCCTCTGCCCGCCCCTGCTGGTGACAAAGGCGATCTGCTGCTGCAAGCCGTCCAGCAATCCTGCTTGGCTGACC |
| | ACCTGCTGACCGCTAGCTGGGGAGCCGACCCCGTTCCCACCAAGGCTCCCGGAGAAGGACAGGAGGGCCTGC |
| | CCCTTACCGGCGCTTGCGCGGGGGGCCCTGGCTTGCCTGCCGGCGAACTGTACGGCTGGGCCGTGGAGACCAC |
| | GCCTTCCCCCGAGGGCGTGTCCAGCCTGGACGATGATGACCTGGATCTGTGCCTGGACAGCGCCAACGACCTG |
| | TACGATGACATCGAGTGCTTTTTGATGGAGCTGGAGCAGCCCGCC |
| | (constitutively active truncated Hu IRF7 1-246 + 468-503 plus |
| | S475D/S476D/S477D/S479D/S483D/S487D; P036 without epitope tag) |
| 218 | ATGGCCCTGGCCCCCGAGAGAGCCGCGCCCAGAGTGCTGTTCGGCGAATGGCTGCTGGGCGAGATCAGCAGC |
| | GGCTGCTATGAGGGCCTGCAGTGGCTCGACGAAGCCAGGACGTGCTTCAGAGTCCCCTGGAAGCACTTCGCCA |
| | GAAAGGATCTGAGCGAGGCTGACGCCAGAATCTTCAAGGCCTGGGCAGTTGCGCGTGGGAGATGGCCCCCCA |
| | GCTCGCGGGGCGGCGGTCCCCCCCCTGAGGCCGAGACCGCCGAAAGAGCCGGATGGAAAACCAACTTTCGAT |
| | GCGCCCTCAGAAGCACCAGACGGTTTGTGATGCTGAGAGATAACAGCGGCGACCCTGCAGACCCCCATAAAGT |
| | GTATGCCCTGAGCAGAGAGCTGTGTTGGCGAGAGGGCCCCGGAACCGACCAAACCGAGGCCGAGGCCCCCGC |
| | CGCCGTACCCCCCCCTCAAGGCCCCCAGCCTGCTGCTCTGACCACGGGAGAAGCCGCCGCTCCTGAGAGCCCCC |
| | ACCAAGCCGAGCCCTATCTGAGCCCTAGCCCCAGCGCCTGCACCGCCGTGCAGGAGCCCTCACCGGGCGCCCT |
| | AGACGTGACCATCATGTACAAGGGGCGCACGGTGCTGCAAAAGGTGGTGGGCCACCCCAGCTGCACCTTCCTG |
| | TACGGCCCCCCCGACCCTGCCGTGAGAGCCACCGACCCCCAGCAAGTCGCCTTCCCCAGCCCCGCCGAGCTGCC |
| | CGACCAGAAGCAGCTGAGGTACACCGAGGAGTTGCTGAGACATGTGGCCCCCGGCTTGCACCTCGAGCTGAG |
| | AGGCCCGCAGCTCTGGGCCAGAAGAATGGGCAAGTGCAAGGTGTACTGGGAGGTGGGCGGCCCCCCCGGCA |
| | GCGCGAGCCCAAGCACCCCGGCCTGCCTGCTGCCTAGAAACTGCGACACCCCTATCTTCGACTTCAGAGTATTT |
| | TTCCAGGAGCTGGTCGAGTTCAGGGCCAGACAGCGTAGAGGCAGCCCCAGATACACCATCTACCTTGGATTCG |
| | GCCAGGACCTGAGCGCCGGCAGACCCAAAGAGAAGTCCCTGGTACTGGTGAAGCTAGAGCCCTGGCTGTGTA |
| | GGGTGCATCTGGAAGGCACCCAAAGAGAGGGCGTAAGCTCGCTTGACAGCAGCAGCCTCAGCCTGTGCCTGA |
| | GCAGCGCTAACAGCTTATACGACGACATCGAGTGCTTCCTGATGGAGCTGGAACAACCCGCC |
| | (truncated Hu IRF7 1-151 + 247-503; P038 without epitope tag; null mutation) |
| 219 | ATGGGCGGCCCTCCCGGGCCTTTCCTGGCCCATACACACGCCGGCCTACAGGCTCCTGGCCCTCTGCCCGCCCC |
| | GGCCGGCGACAAGGGCGACCTCCTGCTGCAGGCCGTGCAGCAGTCCTGTCTGGCCGACCACCTGCTGACTGCT |
| | AGCTGGGGCGCCGATCCCGTGCCCACCAAGGCCCCAGGAGAGGGGCAAGAGGGCCTGCCTCTAACCGGCGCA |
| | TGCGCAGGTGGACCAGGCCTCCCCGCCGGCGAGCTGTATGGTTGGGCCGTGGAGACAACCCCCAGCCCCGGC |
| | CCGCAGCCTGCTGCGCTGACCACAGGCGAGGCCGCTGCCCCTGAGAGCCCCCACCAAGCTGAACCCTACCTGA |
| | GCCCCAGCCCCTCTGCCTGCACAGCGGTGCAGGAGCCCAGTCCCGGCGCCTTGGACGTGACCATCATGTATAA |
| | GGGCAGGACTGTGTTACAAAAGGTAGTGGGCCACCCAAGTTGTACCTTTCTGTACGGGCCCCCCGACCCAGCC |
| | GTGCGCGCCACCGACCCCCAGCAGGTGGCCTTCCCCAGCCCCGCTGAGTTGCCCGATCAGAAACAACTCCGGT |
| | ACACCGAGGAATTACTTAGACATGTGGCTCCCGGCCTGCATCTGGAGCTTAGAGGTCCACAGTTGTGGGCCAG |
| | AAGAATGGGCAAGTGCAAGGTTTATTGGGAGGTCGGAGGCCCCCCGGGCAGCGCCAGCCCCAGCACCCCCGC |
| | CTGTCTTCTGCCCAGAAACTGCGACACCCCAATCTTCGATTTCAGAGTGTTTTTCCAGGAACTGGTGGAGTTCAG |
| | AGCAAGGCAAAGAAGAGGCAGCCCTAGATACACCATCTACCTGGGCTTTGGCCAAGACCTGAGCGCCGGCAG |
| | ACCCAAGGAAAAATCCCTGGTCCTGGTGAAACTGGAGCCCTGGCTGTGCAGAGTCCACCTGGAGGGCACCCAG |
| | AGAGAGGGCGTGAGCAGCCTGGACTCGAGCAGCCTGTCCCTGTGTCTGAGCAGCGCGAATTCGCTATATGACG |
| | ACATCGAATGCTTTCTGATGGAGCTGGAACAGCCCGCC |
| | (truncated Hu IRF7 152-503; P039 without epitope tag; null mutation) |
| 220 | ATGCCTCACAGCAGCCTCCACCCTAGCATCCCTTGCCCTAGAGGCCACGGCGCCCAGAAGGCCGCCCTCGTGCT |
| | TTTAAGCGCCTGCTTGGTGACCCTTTGGGGCTTGGGCGAGCCTCCAGAGCACACCTTGAGATATTTGGTGCTCC |
| | ACCTGGCCAGCCTTCAGCTGGGCTTGTTACTCAACGGCGTGTGCAGCCTGGCCGAGGAGCTGAGACACATCCA |
| | CAGCAGATACAGAGGCAGCTACTGGAGAACCGTGAGAGCGTGTCTGGGCTGCCCTCTGAGAAGAGGCGCCTT |
| | GCTTCTTCTCAGTATCTACTTCTACTACTCCCTGCCTAACGCCGTGGGCCCTCCTTTCACCTGGATGCTGGCACTG |
| | CTCGGCCTCAGCCAGGCCCTGAACATCTTGTTGGGCTTGAAGGGCCTGGCCCCTGCCGAGATCAGCGCCGTGT |
| | GCGAGAAGGGCAACTTCAACATGGCCCACGGATTGGCTTGGAGCTACTACATCGGCTACCTGAGACTGATCCT |
| | GCCTGAGCTGCAGGCCAGAATCAGAACCTACAACCAGCACTACAACAACCTGCTGCGCGGCGCAGTGAGCCAG |
| | AGACTGTATATTCTGCTGCCTCTGGACTGCGGCGTGCCTGACAACCTGAGCATGGCCGACCCTAACATCAGATT |
| | CCTGGACAAGCTGCCTCAGCAGACCGGCGACCACGCCGGCATCAAGGACAGAGTGTACAGCAACAGCATCTAT |
| | GAGCTGCTCGAGAATGGCCAGAGAGCCGGCACCTGCGTGCTGGAGTACGCCACCCCTCTGCAGACCCTGTTCG |
| | CCATGAGCCAGTATAGTCAAGCTGGCTTCAGCAGAGAGGACAGACTGGAGCAGGCCAAGCTGTTCTGCAGAA |
| | CCCTGGAGGACATTCTGGCTGACGCCCCTGAGAGCCAGAACAACTGCCGACTGATCGCCTACCAGGAACCAGC |
| | CGACGACAGCAGCTTCAGTCTTTCTCAGGAGGTTCTTCGCCACTTGCGCCAGGAGGAGAAGGAGGAGGTGACC |
| | GTGGGCAGCCTGAAGACCTCCGCAGTCCCTAGCACCAGCACCATGAGTCAGGAGCCGGAGCTATTAATCAGCG |
| | GCATGGAGAAGCCTCTTCCACTCCGAACCGACTTCAGCGCCACCAACTTCAGCCTGCTGAAGCAGGCAGGTGA |
| | CGTTGAGGAGAATCCGGGACCTATGACCGAGTACAAGCTGGTGGTTGTGGGCGCCGACGGCGTGGGCAAGA |
| | GCGCCCTGACCATCCAGCTGATCCAG |
| | (KRAS(G12D)25 mer_nt.STING(V155M)) |
| 221 | ATGACCGAGTACAAGCTAGTAGTCGTGGGCGCCGACGGCGTGGGCAAGAGCGCCCTCACCATCCAGCTAATCC |
| | AGGCCACCAACTTCAGCTTGCTCAAGCAGGCCGGCGACGTGGAGGAGAACCCAGGCCCTATGCCTCACAGCAG |
| | CCTTCACCCTAGCATCCCTTGCCCTAGAGGCCACGGCGCCCAGAAGGCCGCCCTGGTGCTGCTGAGCGCCTGCC |
| | TGGTGACCCTGTGGGGCCTGGGCGAGCCTCCTGAGCACACCCTGAGATATCTGGTGCTTCACCTGGCCAGTTTA |
| | CAGCTGGGCCTGCTTCTTAACGGCGTGTGCAGCCTGGCCGAGGAGCTGAGACACATCCACAGCAGATACAGAG |
| | GCAGCTACTGGAGAACCGTGAGAGCCTGCCTAGGCTGCCCTCTGAGAAGAGGCGCTCTGTTGCTACTTTCCATC |
| | TACTTCTACTACTCCCTGCCTAACGCCGTGGGCCCTCCTTTCACTTGGATGCTGGCGTTGCTGGGTCTGAGCCAG |
| | GCCCTGAACATCCTTCTCGGTCTGAAGGGCCTGGCCCCTGCCGAGATCAGCGCCGTGTGCGAGAAGGGCAACT |
| | TCAACATGGCCCACGGACTCGCCTGGAGCTACTACATCGGCTACCTGAGACTGATCCTGCCTGAGCTGCAGGCC |
| | AGAATCAGAACCTACAACCAGCACTACAACAACCTGCTGCGGGGCGCCGTGAGCCAGAGACTGTATATACTTC |
| | TTCCTCTGGACTGCGGCGTGCCTGACAACCTGAGCATGGCCGACCCTAACATCAGATTCCTGGACAAGCTGCCT |
| | CAGCAGACCGGCGACCACGCCGGCATCAAGGACAGAGTGTACAGCAACTCCATTTATGAGCTGCTCGAGAATG |
| | GCCAGAGAGCCGGCACCTGCGTGCTGGAGTACGCCACCCCTCTGCAGACCCTGTTCGCCATGAGCCAGTACAG |
| | TCAGGCTGGATTCAGCAGAGAGGACAGACTGGAGCAGGCCAAGCTGTTCTGCAGGACACTGGAGGACATACT |
| | AGCAGACGCCCCTGAGAGCCAGAACAACTGCAGACTGATTGCCTACCAGGAGCCTGCGGACGACAGCTCCTTC |
| | AGTCTGAGTCAGGAGGTGTTGCGGCACTTACGCCAAGAAGAGAAGGAGGAGGTGACCGTGGGCAGCCTGAA |
| | GACTAGCGCTGTGCCTAGCACCAGCACAATGTCACAGGAGCCGGAATTGCTAATCAGCGGCATGGAGAAGCCT |
| | CTCCCATTACGTACCGACTTCAGC |
| | (KRAS(G12D)25 mer_ct.STING(V155M)) |
| 222 | ATGCCTCACAGCAGCCTTCACCCTAGCATCCCTTGCCCTAGAGGCCACGGCGCCCAGAAGGCCGCCCTAGTGCT |
| | CCTTAGCGCCTGCCTCGTGACCCTATGGGGCTTAGGCGAGCCTCCAGAGCACACCTTGAGATACCTCGTCCTCC |
| | ACCTGGCTAGTCTACAGCTGGGCCTTCTCCTCAACGGCGTGTGCAGCCTGGCCGAGGAGCTGAGACACATCCA |
| | CAGCAGATACAGAGGCAGCTACTGGAGAACCGTGAGAGCGTGCCTGGGCTGCCCTCTGAGAAGAGGCGCACT |
| | GCTGTTACTCAGCATCTACTTCTACTACTCACTGCCAAACGCCGTGGGCCCTCCTTTCACCTGGATGCTGGCCTT |
| | GCTCGGATTGAGCCAGGCCCTGAACATTTTACTGGGATTGAAGGGCCTGGCCCCTGCCGAGATCAGCGCCGTG |
| | TGCGAGAAGGGCAACTTCAACATGGCCCACGGCCTAGCTTGGAGCTACTACATCGGCTACCTGAGACTGATCCT |
| | GCCTGAGCTGCAGGCCAGAATCAGAACCTACAACCAGCACTACAACAACCTGCTGCGTGGAGCGGTGAGCCAG |
| | AGACTGTATATCCTCCTGCCTCTGGACTGCGGAGTGCCTGACAACCTGAGCATGGCCGACCCTAACATCAGATT |
| | CCTGGACAAGCTGCCTCAGCAGACCGGCGACCACGCCGGCATCAAGGACAGAGTGTACAGCAACTCAATCTAC |
| | GAGCTGTTGGAGAATGGCCAGAGAGCCGGCACCTGCGTGCTGGAGTACGCCACCCCTCTGCAGACCCTGTTCG |
| | CCATGAGCCAGTACTCTCAGGCAGGCTTCAGCAGAGAGGACAGACTGGAGCAGGCCAAGCTGTTCTGCAGAA |
| | CCCTGGAGGACATCCTGGCGGACGCCCCTGAGAGCCAGAACAACTGCCGGCTTATCGCCTACCAGGAGCCAGC |
| | AGACGACAGCAGCTTCTCTCTCTCACAAGAGGTACTGCGCCATCTTCGCCAGGAGGAGAAGGAGGAGGTGACC |
| | GTGGGCAGCCTGAAGACATCCGCCGTACCTAGCACCAGCACCATGTCTCAGGAACCGGAACTGTTGATCAGCG |
| | GCATGGAGAAGCCTCTGCCACTGCGCACCGACTTCAGCGCCACCAACTTCTCCCTACTGAAGCAAGCCGGTGAC |
| | GTTGAAGAGAACCCTGGCCCTATGACCGAGTACAAGCTGGTAGTAGTAGGCGCCGACGGCGTGGGCAAGAGC |
| | GCCCTGACCATCCAGCTGATCCAGATGACTGAATATAAGCTTGTCGTCGTGGGCGCAGATGGCGTTGGTAAGA |
| | GCGCACTTACAATTCAACTCATTCAGATGACGGAGTATAAGCTGGTGGTGGTCGGAGCTGACGGCGTAGGCAA |
| | GAGTGCCCTTACTATTCAGCTAATTCAG |
| | (KRAS(G12D)25 mer\hat{ }3_nt.STING(V155M)) |
| 223 | ATGACCGAGTACAAGCTTGTGGTGGTTGGCGCCGACGGCGTGGGCAAGAGCGCCTTAACCATCCAGCTTATCC |
| | AGATGACAGAGTATAAGCTAGTGGTGGTCGGCGCAGACGGAGTGGGAAAGAGTGCATTAACTATTCAACTCA |
| | TCCAAATGACCGAATACAAGCTAGTAGTTGTGGGTGCAGATGGCGTCGGCAAGTCTGCACTGACAATTCAGCT |
| | CATCCAGGCCACCAACTTCAGCCTGCTGAAGCAGGCCGGCGACGTGGAGGAGAACCCTGGCCCTATGCCTCAC |
| | AGCAGCCTGCACCCTAGCATCCCTTGCCCTAGAGGCCACGGCGCCCAGAAGGCCGCCCTGGTGCTGCTGAGCG |
| | CCTGCCTGGTGACCCTGTGGGGCCTGGGCGAGCCTCCTGAGCACACCCTGAGATACCTAGTTTTGCACCTGGCT |
| | TCTCTGCAGCTGGGCCTACTGCTCAACGGCGTGTGCAGCCTGGCCGAGGAGCTGAGACACATCCACAGCAGAT |
| | ACAGAGGCAGCTACTGGAGAACCGTGAGAGCATGCTTAGGCTGCCCTCTGAGAAGAGGCGCTCTGCTCCTCTT |
| | GTCCATCTACTTCTACTACTCGCTACCTAACGCCGTGGGCCCTCCTTTCACCTGGATGCTGGCCCTCTTGGGATTA |
| | AGCCAGGCCCTGAACATCTTGCTGGGACTGAAGGGCCTGGCCCCTGCCGAGATCAGCGCCGTGTGCGAGAAG |
| | GGCAACTTCAACATGGCCCACGGACTCGCTTGGAGCTACTACATCGGCTACCTGAGACTGATCCTGCCTGAGCT |
| | GCAGGCCAGAATCAGAACCTACAACCAGCACTACAACAACCTGCTGCGGGGAGCAGTGAGCCAGAGACTGTA |
| | TATTCTGCTCCCTCTGGACTGCGGCGTGCCTGACAACCTGAGCATGGCCGACCCTAACATCAGATTCCTGGACA |
| | AGCTGCCTCAGCAGACCGGCGACCACGCCGGCATCAAGGACAGAGTGTACAGCAACAGCATTTACGAGCTGCT |
| | GGAGAACGGCCAGAGAGCCGGCACCTGCGTGCTGGAGTACGCCACCCCTCTGCAGACCCTGTTCGCCATGAGC |
| | CAGTACTCCCAGGCAGGATTCAGCAGAGAGGACAGACTGGAGCAGGCCAAGCTGTTCTGCCGTACTCTTGAGG |
| | ACATCCTTGCAGACGCCCCTGAGAGCCAGAACAACTGCCGGTTGATTGCCTACCAGGAACCGGCAGACGACAG |
| | CTCATTCTCCTTGTCTCAGGAGGTCCTTAGACACCTGCGGCAGGAGGAGAAGGAGGAGGTGACCGTGGGCAG |
| | CCTGAAGACATCCGCCGTGCCTAGCACGTCTACCATGTCCCAGGAGCCGGAACTGCTAATCAGCGGCATGGAG |
| | AAGCCTCTGCCTCTCAGGACCGACTTCAGC |
| | (KRAS(G12D)25 mer\hat{ }3_ct.STING(V155M)) |
| 224 | MPHSSLHPSIPCPRGHGAQKAALVLLSACLVTLWGLGEPPEHTLRYLVLHLASLQLGLLLNGVCSLAEELRHIHSRYRG |
| | SYWRTVRACLGCPLRRGALLLLSIYFYYSLPNAVGPPFTWMLALLGLSQALNILLGLKGLAPAEISAVCEKGNFNVAH |
| | GLAWSYYIGYLRLILPELQARIRTYNQHYNNLLRGAVSQRLYILLPLDCGVPDNLSMADPNIRFLDKLPQQTGDHAGI |
| | KDRVYSNSIYELLENGQRAGTCVLEYATPLQTLFAMSQYSQAGFSREDkLEQAKLFCRTLEDILADAPESQNNCRLIAY |
| | QEPADDSSFSLSQEVLRHLRQEEKEEVTVGSLKTSAVPSTSTMSQEPELLISGMEKPLPLRTDFST |
| | (Hu STING (R284K) var; no epitope tag) |
| 225 | ATGCCCCATAGCAGCCTGCACCCCAGCATCCCCTGCCCCAGAGGCCACGGCGCCCAGAAGGCCGCCCTGGTCCT |
| | GCTGAGCGCATGCCTGGTCACCCTGTGGGGCCTGGGCGAGCCCCCCGAGCACACCCTGAGATACCTGGTGCTG |
| | CACCTCGCCAGCCTGCAGCTGGGCCTGCTGCTGAACGGCGTGTGCAGCCTGGCCGAGGAGCTGAGACACATCC |
| | ACAGCAGATATAGAGGCAGCTACTGGAGAACCGTGAGAGCTTGCCTCGGCTGCCCCCTGAGAAGAGGCGCCC |
| | TGCTGCTGCTGAGCATCTACTTTTACTACAGCCTGCCCAACGCTGTGGGCCCCCCTTTCACGTGGATGCTCGCCC |
| | TGCTGGGACTGAGCCAGGCCCTGAACATCCTGCTGGGCCTTAAGGGCCTAGCCCCCGCCGAGATCAGCGCCGT |
| | GTGCGAGAAGGGCAACTTCAATGTGGCCCACGGCCTGGCCTGGAGCTACTACATCGGCTACCTGAGACTGATC |
| | CTGCCCGAGCTGCAGGCCAGAATCAGAACCTACAATCAGCACTACAACAACCTGCTGAGAGGCGCCGTGAGCC |
| | AGAGACTGTACATCCTGCTGCCCCTGGACTGCGGCGTGCCCGACAACCTCAGCATGGCCGACCCCAACATCAG |
| | ATTCCTGGACAAGCTGCCCCAGCAGACCGGCGACCACGCCGGCATCAAGGATCGCGTGTACAGCAACAGCATC |
| | TACGAGCTGCTGGAAAACGGCCAGAGAGCCGGAACCTGCGTGCTGGAGTACGCCACACCCCTGCAGACCCTGT |
| | TCGCCATGAGCCAGTACAGCCAGGCCGGCTTCAGCAGAGAGGACAAGCTGGAGCAGGCCAAGCTGTTCTGCA |
| | GAACCCTGGAGGATATCCTCGCCGACGCCCCCGAGAGCCAGAACAACTGCAGGCTGATCGCGTACCAGGAGCC |
| | CGCTGACGACAGCAGCTTTAGCCTGAGCCAGGAGGTGCTGAGACATCTGCGTCAAGAGGAAAAGGAGGAGGT |
| | GACCGTGGGCTCCCTGAAGACCAGCGCCGTGCCCAGCACCAGCACCATGAGCCAGGAGCCCGAGCTGCTGATC |
| | AGCGGCATGGAGAAGCCACTGCCCCTCAGAACCGACTTCAGCACC |
| | (Hu STING (R284K) var; no epitope tag) |
| 226 | EGAMVAATQGAAAAAGSGAGTGGGTASGGTEGGSAESEGAK |
| | Cathepsin B sensitive site |
| 227 | AMVAATQGAAAAAGSGAGTGGGTASGGTEGGSAESEGAK |
| | Cathepsin B sensitive site |
| 228 | GGGGGGGGAGAAGGGGGGENYDDPHK |
| | Cathepsin B sensitive site |
| 229 | MVAATQGAAAAAGSGAGTGGGTASGGTEGGSAESEGAK |
| | Cathepsin B sensitive site |
| 230 | QLLCGAAIGTHEDDKYR |
| | Cathepsin B sensitive site |
| 231 | FSHHFEDADNIYIFLELCSRKS |
| | Cathepsin B sensitive site |
| 232 | YXLVGAGAIGCELLK |
| | Cathepsin B sensitive site |
| 233 | IPESCSFGYHAGGWGKPPVDETGKPL |
| | Cathepsin B sensitive site |
| 234 | VAATQGAAAAAGSGAGTGGGTASGGTEGGSASEGAK |
| | Cathepsin B sensitive site |
| 235 | SEADIEGPLPAKDIHLDLPSNN |
| | Cathepsin B sensitive site |
| 236 | HFNALGGWGELQNSVK |
| | Cathepsin B sensitive site |
| 237 | FAQALGLTEAVK |
| | Cathepsin B sensitive site |
| 238 | TSVLAAANPIESQWNPK |
| | Cathepsin B sensitive site |
| 239 | QLLQANPILESFGNAK |
| | Cathepsin B sensitive site |
| 240 | TSILAAANPISGHYDR |
| | Cathepsin B sensitive site |
| 241 | IXXANPLLEAFGNAK |
| | Cathepsin B sensitive site |
| 242 | LYGAQFHPEVGLTENGK |
| | Cathepsin B sensitive site |
| 243 | PQGQAPPLSQAQGHPGIQTPQR |
| | Cathepsin B sensitive site |
| 244 | AAASAAAASAASGSPGPGEGSAGGEKR |
| | Cathepsin B sensitive site |
| 245 | IXXXFLGASLKDEVLK |
| | Cathepsin B sensitive site |
| 246 | LTISPDYAYGATGHPGIIPPH |
| | Cathepsin B sensitive site |
| 247 | LTISPDYAYGATGHPGIIPPHA |
| | Cathepsin B sensitive site |
| 248 | ILISLATGHREEGGENLDQ |
| | Cathepsin B sensitive site |
| 249 | LSELTQQLAQATGKPPQYIAVHVVPDQ |
| | Cathepsin B sensitive site |
| 250 | LSELTQQLAQATGKPPQYIAVHVVPDQL |
| | Cathepsin B sensitive site |
| 251 | DATNVGDEGGFAPNILENK |
| | Cathepsin B sensitive site |
| 252 | ILAQATSDLVNAIK |
| | Cathepsin B sensitive site |
| 253 | VXXVXQHAVGIVVNK |
| | Cathepsin B sensitive site |
| 254 | GSLAEAVGSPPPAATPTPTPPTR |
| | Cathepsin B sensitive site |
| 255 | SXGLPVGAVINCADNTGAK |
| | Cathepsin B sensitive site |
| 256 | YCFSEMAPVCAVVGGILAQEIVK |
| | Cathepsin B sensitive site |
| 257 | HVYGYSMAYGPAQHAISTEK |
| | Cathepsin B sensitive site |
| 258 | LWQLSKPRPGCSVLGPLPLL |
| | Cathepsin B sensitive site |
| 259 | MILIQDGSQNTNVDKPLR |
| | Cathepsin B sensitive site |
| 260 | TYSMVVVPLYDTLGPGAIRYII |
| | Cathepsin B sensitive site |
| 261 | HFAMMHGGTGFAGIDSSSPEVK |
| | Cathepsin B sensitive site |
| 262 | GXLKPGMVVTFAPVNVTTEVK |
| | Cathepsin B sensitive site |
| 263 | FNALFAQGNYSEAAK |
| | Cathepsin B sensitive site |
| 264 | GPIHIGGPPGFASSSGKPGPTVIK |
| | Cathepsin B sensitive site |
| 265 | GFGFVTFDDHDPVDK |
| | Cathepsin B sensitive site |
| 266 | DQGSCGSCWAFGAVEAISDR |
| | Cathepsin B sensitive site |
| 267 | GXNFGFGDSRGGGGNFGPGPG |
| | Cathepsin B sensitive site |
| 268 | HDLFDSGFGGGAGVETGGK |
| | Cathepsin B sensitive site |
| 269 | CYLFGGLANDSEDPK |
| | Cathepsin B sensitive site |
| 270 | TTEDSVMLNGFGTVVNALGK |
| | Cathepsin B sensitive site |
| 271 | LTEGLHGFHVHEFGDNTAGC |
| | Cathepsin B sensitive site |
| 272 | GYAFIEYEHER |
| | Cathepsin B sensitive site |
| 273 | MFIGGLSWDTSKK |
| | Cathepsin B sensitive site |
| 274 | MFIGGLSWDTTKK |
| | Cathepsin B sensitive site |
| 275 | SMGFIGHYLDQK |
| | Cathepsin B sensitive site |
| 276 | SMGFIGHYLDQK |
| | Cathepsin B sensitive site |
| 277 | ALXGGIGFIHHNCTPEFQANE |
| | Cathepsin B sensitive site |
| 278 | NLQSTFSGFGFINSENVFK |
| | Cathepsin B sensitive site |
| 279 | GFCFITYTDEEPVKK |
| | Cathepsin B sensitive site |
| 280 | MPMFIVNTNVPR |
| | Cathepsin B sensitive site |
| 281 | VSEIFVELQGFLAAEQDIR |
| | Cathepsin B sensitive site |
| 282 | GFCFLEYEDHK |
| | Cathepsin B sensitive site |
| 283 | QAVSMFLGAVEEAKK |
| | Cathepsin B sensitive site |
| 284 | KPXKPMQFLGDEETVRK |
| | Cathepsin B sensitive site |
| 285 | GAAEPHTIAAFLGGAAAQEVIK |
| | Cathepsin B sensitive site |
| 286 | MIPCDFLIPVQTQHPIR |
| | Cathepsin B sensitive site |
| 287 | QGAPTSFLPPEASQLKPDR |
| | Cathepsin B sensitive site |
| 288 | STGGAPTFNVTVTK |
| | Cathepsin B sensitive site |
| 289 | MVYMFQYDSTHGK |
| | Cathepsin B sensitive site |
| 290 | HFPMTHGNTGFSGIESSSPEVK |
| | Cathepsin B sensitive site |
| 291 | AVAFSPVTELKK |
| | Cathepsin B sensitive site |
| 292 | GFGFVTFSSMAEVDAAMAARPH |
| | Cathepsin B sensitive site |
| 293 | TCGFDFTGAVEDISK |
| | Cathepsin B sensitive site |
| 294 | EYSGLSDGYGFTTDLFGR |
| | Cathepsin B sensitive site |
| 295 | GQHVXGSPFQFTVGPLGEGGAHK |
| | Cathepsin B sensitive site |
| 296 | GFGFVDFNSEEDAK |
| | Cathepsin B sensitive site |
| 297 | FXFVEFEDPR |
| | Cathepsin B sensitive site |
| 298 | FXFVEFEDPR |
| | Cathepsin B sensitive site |
| 299 | IELFVGGELIDPADDRK |
| | Cathepsin B sensitive site |
| 300 | MFVGGLSWDTSKK |
| | Cathepsin B sensitive site |
| 301 | AFSAFVGQMHQQGILK |
| | Cathepsin B sensitive site |
| 302 | GILFVGSGVSGGEEGAR |
| | Cathepsin B sensitive site |
| 303 | IIAFVGSPVEDNEKDLVK |
| | Cathepsin B sensitive site |
| 304 | DYAFVHFEDR |
| | Cathepsin B sensitive site |
| 305 | GYAFVHFETQEAADK |
| | Cathepsin B sensitive site |
| 306 | GYGFVHFETQEAAER |
| | Cathepsin B sensitive site |
| 307 | NYGFVHIEDK |
| | Cathepsin B sensitive site |
| 308 | ITLPVDFVTADKFDENAK |
| | Cathepsin B sensitive site |
| 309 | GFGFVTFDDHDPVDK |
| | Cathepsin B sensitive site |
| 310 | LPNFGFVVFDDSEPVQK |
| | Cathepsin B sensitive site |
| 311 | GFGFVYFQNHDAADK |
| | Cathepsin B sensitive site |
| 312 | YQFWDTQPVPK |
| | Cathepsin B sensitive site |
| 313 | QLLCGAAIGTHEDDKYR |
| | Cathepsin B sensitive site |
| 314 | QLLCGAAIGTHEDDKYR |
| | Cathepsin B sensitive site |
| 315 | PPAGGGGGAGGAGGGPPPGPPGAGDR |
| | Cathepsin B sensitive site |
| 316 | FGGSFAGSFGGAGGHAPGVAR |
| | Cathepsin B sensitive site |
| 317 | CNPIISGLYQGAGGPGPGGFGAQGPK |
| | Cathepsin B sensitive site |
| 318 | PGLNLPPPIGGAGPPLGLPKPK |
| | Cathepsin B sensitive site |
| 319 | QPXVDGFLVGGASLKPEFVDIINAK |
| | Cathepsin B sensitive site |
| 320 | VTGDHIPTPQDLPQR |
| | Cathepsin B sensitive site |
| 321 | YGGELVPHFPAR |
| | Cathepsin B sensitive site |
| 322 | YQGAGGPGPGGFGAQGPK |
| | Cathepsin B sensitive site |
| 323 | EYFGGFGEVESIELPMDNK |
| | Cathepsin B sensitive site |
| 324 | ALVLGGFAHMDTETK |
| | Cathepsin B sensitive site |
| 325 | VSHVSTGGGASLELLEGK |
| | Cathepsin B sensitive site |
| 326 | AEGGGGGGRPGAPAAGDGK |
| | Cathepsin B sensitive site |
| 327 | RGGGGGGSGGIGYPYPR |
| | Cathepsin B sensitive site |
| 328 | NMGGPYGGGNYGPGGSGGSGGYG |
| | Cathepsin B sensitive site |
| 329 | GTGGVDTAATGGVFDISNLDR |
| | Cathepsin B sensitive site |
| 330 | HFNALGGWGELQNSVK |
| | Cathepsin B sensitive site |
| 331 | PESCSFGYHAGGWGKPPVDETGKPL |
| | Cathepsin B sensitive site |
| 332 | SSLPNFCGIFNHLER |
| | Cathepsin B sensitive site |
| 333 | AMALXGGIGFIHHNCTPEF |
| | Cathepsin B sensitive site |
| 334 | AMALXGGIGFIHHNCTPEFQANE |
| | Cathepsin B sensitive site |
| 335 | EWIKPIMFSGGIGSMEADHISK |
| | Cathepsin B sensitive site |
| 336 | GDGPVQGIINFEQK |
| | Cathepsin B sensitive site |
| 337 | EMAPVCAVVGGILAQEIVK |
| | Cathepsin B sensitive site |
| 338 | LAFHGILLHGLEDR |
| | Cathepsin B sensitive site |
| 339 | MGVVAGILVQNVLK |
| | Cathepsin B sensitive site |
| 340 | FTASAGIQVVGDDLTVTNPK |
| | Cathepsin B sensitive site |
| 341 | TPYQIACGISQGLADNTVIAK |
| | Cathepsin B sensitive site |
| 342 | YPIEHGIVTNWDDMEK |
| | Cathepsin B sensitive site |
| 343 | VASGIPAGWXGLDCGPESSKK |
| | Cathepsin B sensitive site |
| 344 | LFVGGLDWSTTQETLR |
| | Cathepsin B sensitive site |
| 345 | HGGSLGLGLAAMGTAR |
| | Cathepsin B sensitive site |
| 346 | IFVGGLSANTVVEDVK |
| | Cathepsin B sensitive site |
| 347 | LFIGGLSFETTDDSLR |
| | Cathepsin B sensitive site |
| 348 | LFIGGLSFETTDESLR |
| | Cathepsin B sensitive site |
| 349 | LFIGGLSFETTEESLR |
| | Cathepsin B sensitive site |
| 350 | MFXGGLSWDTSKK |
| | Cathepsin B sensitive site |
| 351 | DAVSGMGVIVHIIEK |
| | Cathepsin B sensitive site |
| 352 | GGNFGFGDSR |
| | Cathepsin B sensitive site |
| 353 | GTTGSGAGSGGPGGLTSAAPAGGDKK |
| | Cathepsin B sensitive site |
| 354 | IISGLYQGAGGPGPGGFGAQGPK |
| | Cathepsin B sensitive site |
| 355 | IISGLYQGAGGPGPGGFGAQGPK |
| | Cathepsin B sensitive site |
| 356 | GGGLLIGGQAWDWANQGEDERV |
| | Cathepsin B sensitive site |
| 357 | GNFGGSFAGSFGGAGGHAPGVAR |
| | Cathepsin B sensitive site |
| 358 | NFGGSFAGSFGGAGGHAPGVAR |
| | Cathepsin B sensitive site |
| 359 | SAADTKPGTTGSGAGSGGPGGLTSAAPAGGDKK |
| | Cathepsin B sensitive site |
| 360 | AATQGAAAAAGSGAGTGGGTASGGTEGGSAESEGAK |
| | Cathepsin B sensitive site |
| 361 | GSSGGSGAKPSDAASEAAR |
| | Cathepsin B sensitive site |
| 362 | IQFHFHWGSLDGQGSEHTVDK |
| | Cathepsin B sensitive site |
| 363 | MILIQDGSQNTNVDKPLR |
| | Cathepsin B sensitive site |
| 364 | KGTFTDDLHK |
| | Cathepsin B sensitive site |
| 365 | QQSHFAMMHGGTGFAGIDSSSPEVK |
| | Cathepsin B sensitive site |
| 366 | VAVLISGTGSNLQALIDSTR |
| | Cathepsin B sensitive site |
| 367 | FLAAGTHLGGTNLDFQ |
| | Cathepsin B sensitive site |
| 368 | LVLGTHTSDEQNHL |
| | Cathepsin B sensitive site |
| 369 | TGGVDTAATGGVFDISNLDR |
| | Cathepsin B sensitive site |
| 370 | TGGVDTAAVGGVFDVSNADR |
| | Cathepsin B sensitive site |
| 371 | AVXIVAAGVGEFEAGISK |
| | Cathepsin B sensitive site |
| 372 | EILTLLQGVHQGAGFQDIPK |
| | Cathepsin B sensitive site |
| 373 | MKPLMGVIYVPLTDKEK |
| | Cathepsin B sensitive site |
| 374 | ECISXHVGQAGVQIGNACWE |
| | Cathepsin B sensitive site |
| 375 | HFNALGGWGELQNSVK |
| | Cathepsin B sensitive site |
| 376 | ESCSFGYHAGGWGKPPVDETGKPL |
| | Cathepsin B sensitive site |
| 377 | AGYVTHLMK |
| | Cathepsin B sensitive site |
| 378 | TMFSSEVQFGHAGACANQASETAVAK |
| | Cathepsin B sensitive site |
| 379 | MPFPVNHGASSEDTLLK |
| | Cathepsin B sensitive site |
| 380 | FFLHHLIAEIHTAEIRAT |
| | Cathepsin B sensitive site |
| 381 | NXSAXQVLIEHIGNLDR |
| | Cathepsin B sensitive site |
| 382 | GGYVLHIGTIYGDLK |
| | Cathepsin B sensitive site |
| 383 | DXHLGGEDFDNR |
| | Cathepsin B sensitive site |
| 384 | GILGPPPPSFHLGGPAVGPR |
| | Cathepsin B sensitive site |
| 385 | PTPPPTLHLVPEPAAPPPP |
| | Cathepsin B sensitive site |
| 386 | YGPQYGHPPPPPPPPEYGPHADSPV |
| | Cathepsin B sensitive site |
| 387 | KHSGPNSADSANDGFVR |
| | Cathepsin B sensitive site |
| 388 | RPELLTHSTTEVTQPR |
| | Cathepsin B sensitive site |
| 389 | LXGHVGFDSLPDQLVNK |
| | Cathepsin B sensitive site |
| 390 | AASATQTIAAAQHAASTPK |
| | Cathepsin B sensitive site |
| 391 | CLTQSGIAGGYKPF |
| | Cathepsin B sensitive site |
| 392 | ELAQIAGRPTEDEDEKEK |
| | Cathepsin B sensitive site |
| 393 | AITIAGVPQSVTECVK |
| | Cathepsin B sensitive site |
| 394 | GLCAIAQAESLR |
| | Cathepsin B sensitive site |
| 395 | KPTALIGVAAIGGAFSEQILK |
| | Cathepsin B sensitive site |
| 396 | DYMNVQCHACIGGTNVGEDIR |
| | Cathepsin B sensitive site |
| 397 | NTQNFQSLHNIGSVVQHSEGKPL |
| | Cathepsin B sensitive site |
| 398 | LKPPTLIHGQAPSAGLPSQKPK |
| | Cathepsin B sensitive site |
| 399 | VLIIGGGDGGVLR |
| | Cathepsin B sensitive site |
| 400 | GCITIIGGGDTATCCAK |
| | Cathepsin B sensitive site |
| 401 | GRPSETGIIGIIDPECR |
| | Cathepsin B sensitive site |
| 402 | EAFGWHAIIVDGHSVEELCK |
| | Cathepsin B sensitive site |
| 403 | LAAAILGGVDQIHIKPG |
| | Cathepsin B sensitive site |
| 404 | LYSILGTTLKDEGK |
| | Cathepsin B sensitive site |
| 405 | MILIQDGSQNTNVDKPLR |
| | Cathepsin B sensitive site |
| 406 | LAMQEFMILPVGAANFR |
| | Cathepsin B sensitive site |
| 407 | VPYLIAGIQHSCQDIGAK |
| | Cathepsin B sensitive site |
| 408 | TVAGGVHISGLHTESAPR |
| | Cathepsin B sensitive site |
| 409 | VAVLISGTGSNLQALIDSTR |
| | Cathepsin B sensitive site |
| 410 | GITAIGGTSTISSEGTQHSYSEEEK |
| | Cathepsin B sensitive site |
| 411 | AGVSISVVHGNLSEEAAK |
| | Cathepsin B sensitive site |
| 412 | HVTQAHVQTGITAAPPPHPGAPHPPQ |
| | Cathepsin B sensitive site |
| 413 | AGLFLPGSVGITDPCESGNFR |
| | Cathepsin B sensitive site |
| 414 | AFAHITGGGLLENIPR |
| | Cathepsin B sensitive site |
| 415 | ILAQITGTEHLK |
| | Cathepsin B sensitive site |
| 416 | TFXNITPAEVGVLVGK |
| | Cathepsin B sensitive site |
| 417 | HSSGIVADLSEQSLK |
| | Cathepsin B sensitive site |
| 418 | EDGNEEDKENQGDETQGQQPPQR |
| | Cathepsin B sensitive site |
| 419 | PGPSGITIPGKPGAQGVPGPPG |
| | Cathepsin B sensitive site |
| 420 | GLTKPAALAAAPAKPGGAGGSK |
| | Cathepsin B sensitive site |
| 421 | LGAQLADLHLDNK |
| | Cathepsin B sensitive site |
| 422 | SLVASLAEPDFVVTDFAK |
| | Cathepsin B sensitive site |
| 423 | MSLPLLAGGVADDINTNKK |
| | Cathepsin B sensitive site |
| 424 | QPYAVSELAGHQTSAESWGTGR |
| | Cathepsin B sensitive site |
| 425 | VTVAGLAGKDPVQC |
| | Cathepsin B sensitive site |
| 426 | IITLAGPTNAIFK |
| | Cathepsin B sensitive site |
| 427 | STHGLAILGPENPK |
| | Cathepsin B sensitive site |
| 428 | ASAELALGENSEVLK |
| | Cathepsin B sensitive site |
| 429 | ILISLATGHREEGGENLDQ |
| | Cathepsin B sensitive site |
| 430 | AMSRPFGVALLFGGVDEK |
| | Cathepsin B sensitive site |
| 431 | LQATAHAQAQLGCPVIIHPGR |
| | Cathepsin B sensitive site |
| 432 | ILAGLGFDPEMQNRPT |
| | Cathepsin B sensitive site |
| 433 | PERPQQLPHGLGGIGMGLGPGGQPIDANHLNK |
| | Cathepsin B sensitive site |
| 434 | QLMQLIGPAGLGGLGGLGALTGPG |
| | Cathepsin B sensitive site |
| 435 | HFNALGGWGELQNSVK |
| | Cathepsin B sensitive site |
| 436 | MGAGLGHGMDR |
| | Cathepsin B sensitive site |
| 437 | THMTAIVGMALGHRPIPNQPPT |
| | Cathepsin B sensitive site |
| 438 | PHGLGGIGMGLGPGGQPIDANHLNK |
| | Cathepsin B sensitive site |
| 439 | ASQGDSISSQLGPIHPPPR |
| | Cathepsin B sensitive site |
| 440 | VWQLGSSSPNFTLEGHEK |
| | Cathepsin B sensitive site |
| 441 | YVATLGVEVHPL |
| | Cathepsin B sensitive site |
| 442 | KLIADYSPDDIFN |
| | Cathepsin B sensitive site |
| 443 | TXGLIFVVDSNDR |
| | Cathepsin B sensitive site |
| 444 | VPEFQFLIGDEAATHLK |
| | Cathepsin B sensitive site |
| 445 | CNINLLPLPDPIPSGLME |
| | Cathepsin B sensitive site |
| 446 | LITEMVALNPDFKPPADYKPPA |
| | Cathepsin B sensitive site |
| 447 | NQVALNPQNTVFDAK |
| | Cathepsin B sensitive site |
| 448 | GLLKPGLNVVLEGPK |
| | Cathepsin B sensitive site |
| 449 | GVNLPGAAVDLPAVSEK |
| | Cathepsin B sensitive site |
| 450 | ISXGLPVGAVINCADNTGAK |
| | Cathepsin B sensitive site |
| 451 | GQVCLPVISAENWK |
| | Cathepsin B sensitive site |
| 452 | EILTLLQGVHQGAGFQDIPK |
| | Cathepsin B sensitive site |
| 453 | NNQFQALLQYADPVSAQHAK |
| | Cathepsin B sensitive site |
| 454 | LFIGGLSFETTDDSLR |
| | Cathepsin B sensitive site |
| 455 | AIQLSGAEQLEALK |
| | Cathepsin B sensitive site |
| 456 | DVSIEDSVISLSGDHCIIGR |
| | Cathepsin B sensitive site |
| 457 | EYLLSGDISEAEHCLK |
| | Cathepsin B sensitive site |
| 458 | VVISSDGQFALSGSWDGTLR |
| | Cathepsin B sensitive site |
| 459 | VHEQLAALSQGPISKPK |
| | Cathepsin B sensitive site |
| 460 | LVXLXXETALLSSGFSLEDPQTH |
| | Cathepsin B sensitive site |
| 461 | GPDGLTAFEATDNQAIK |
| | Cathepsin B sensitive site |
| 462 | ALYWLSGLTCTEQNFISK |
| | Cathepsin B sensitive site |
| 463 | IITLTGPTNAIFK |
| | Cathepsin B sensitive site |
| 464 | LATQLTGPVMPVR |
| | Cathepsin B sensitive site |
| 465 | FPSLLTHNENMVAK |
| | Cathepsin B sensitive site |
| 466 | LEXLXTINXGLTSIANLPK |
| | Cathepsin B sensitive site |
| 467 | ALLLLLVGGVDQSPR |
| | Cathepsin B sensitive site |
| 468 | GKPVGLVGVTELSDAQKK |
| | Cathepsin B sensitive site |
| 469 | VNVAGLVLAGSADFK |
| | Cathepsin B sensitive site |
| 470 | QGYIGAALVLGGVDVTGPH |
| | Cathepsin B sensitive site |
| 471 | LYTLVLTDPDAPSR |
| | Cathepsin B sensitive site |
| 472 | AQIHDLVLVGGSTR |
| | Cathepsin B sensitive site |
| 473 | LNHVAAGLVSPSLKSDTSSK |
| | Cathepsin B sensitive site |
| 474 | IEVGLVVGNSQVAFEK |
| | Cathepsin B sensitive site |
| 475 | GYHQSASEHGLVVIAPDTSPR |
| | Cathepsin B sensitive site |
| 476 | GYHQSASEHGLVVIAPDTSPR |
| | Cathepsin B sensitive site |
| 477 | QDHPWLLSQNLVVKPDQLIK |
| | Cathepsin B sensitive site |
| 478 | MGLAMGGGGGASFDR |
| | Cathepsin B sensitive site |
| 479 | QLPHGLGGIGMGLGPGGQPIDANHLNK |
| | Cathepsin B sensitive site |
| 480 | VVVLMGSTSDLGHCEK |
| | Cathepsin B sensitive site |
| 481 | MALIQMGSVEEAVQA |
| | Cathepsin B sensitive site |
| 482 | TTGFGMIYDSLDYAK |
| | Cathepsin B sensitive site |
| 483 | WLLAEMLGDLSDSQLK |
| | Cathepsin B sensitive site |
| 484 | QAQYLGMSCDGPFKPDH |
| | Cathepsin B sensitive site |
| 485 | AHSSMVGVNLPQK |
| | Cathepsin B sensitive site |
| 486 | SGPVVAMVWEGLNVVK |
| | Cathepsin B sensitive site |
| 487 | VNTQNFQSLHNIGSVVQHSEGKPL |
| | Cathepsin B sensitive site |
| 488 | LYVSNLGIGHTR |
| | Cathepsin B sensitive site |
| 489 | VYVGNLGNNGNKTELER |
| | Cathepsin B sensitive site |
| 490 | IVDLLQMLEMNMAIAFPA |
| | Cathepsin B sensitive site |
| 491 | VLAQNSGFDLQETLVK |
| | Cathepsin B sensitive site |
| 492 | QQSHFPMTHGNTGFSGIESSSPEVK |
| | Cathepsin B sensitive site |
| 493 | ILIANTGMDTDKIK |
| | Cathepsin B sensitive site |
| 494 | NNTVTPGGKPNK |
| | Cathepsin B sensitive site |
| 495 | VVNVANVGAVPSGQDNIHR |
| | Cathepsin B sensitive site |
| 496 | MPFPVNHGASSEDTLLK |
| | Cathepsin B sensitive site |
| 497 | RPKDPGHPY |
| | Cathepsin B sensitive site |
| 498 | ELDIMEPKVPDDIYK |
| | Cathepsin B sensitive site |
| 499 | AETSQQEASEGGDPASPALSLS |
| | Cathepsin B sensitive site |
| 500 | LLAAQNPLSQADRPHQ |
| | Cathepsin B sensitive site |
| 501 | PDNFXFGQSGAGNNWAK |
| | Cathepsin B sensitive site |
| 502 | MIAGQVLDINLAAEPK |
| | Cathepsin B sensitive site |
| 503 | IILNSHSPAGSAAISQQDFHPK |
| | Cathepsin B sensitive site |
| 504 | GAVAVSAAPGSAAPAAGSAPAAAEEK |
| | Cathepsin B sensitive site |
| 505 | SAAGAAGSAGGSSGAAGAAGGGAGAGTRPGDGGTASAGAAGPGAATK |
| | Cathepsin B sensitive site |
| 506 | FTASAGIQVVGDDLTVTNPK |
| | Cathepsin B sensitive site |
| 507 | FGIVTSSAGTGTTEDTEAKK |
| | Cathepsin B sensitive site |
| 508 | SLYQSAGVAPESFEYIEAHGTGTK |
| | Cathepsin B sensitive site |
| 509 | VSEIDEMFEARKM |
| | Cathepsin B sensitive site |
| 510 | FGGSFAGSFGGAGGHAPG |
| | Cathepsin B sensitive site |
| 511 | FGGSFAGSFGGAGGHAPGVAR |
| | Cathepsin B sensitive site |
| 512 | AADTKPGTTGSGAGSGGPGGLTSAAPAGGDKK |
| | Cathepsin B sensitive site |
| 513 | ATQGAAAAAGSGAGTGGGTASGGTEGGSAESEGAK |
| | Cathepsin B sensitive site |
| 514 | EIELIGSGGFGQVFK |
| | Cathepsin B sensitive site |
| 515 | KPGTTGSGAGSGGPGGLTSAAPAGGDKK |
| | Cathepsin B sensitive site |
| 516 | LYANXVXSGGTTMYPGIADR |
| | Cathepsin B sensitive site |
| 517 | RSGKYDLDFK |
| | Cathepsin B sensitive site |
| 518 | HDGYGSHGPLLPLPSR |
| | Cathepsin B sensitive site |
| 519 | SLFSSIGEVESAK |
| | Cathepsin B sensitive site |
| 520 | LQSIGTENTEENR |
| | Cathepsin B sensitive site |
| 521 | SLVASLAEPDFVVTDFAK |
| | Cathepsin B sensitive site |
| 522 | AEPMGEKPVGSLAGIGEVLGK |
| | Cathepsin B sensitive site |
| 523 | VQEAINSLGGSVFPK |
| | Cathepsin B sensitive site |
| 524 | SAAAASAASGSPGPGEGSAGGEKR |
| | Cathepsin B sensitive site |
| 525 | QTIDNSQGAYQEAFDISKK |
| | Cathepsin B sensitive site |
| 526 | FGIVTSSAGTGTTEDTEAK |
| | Cathepsin B sensitive site |
| 527 | FGIVTSSAGTGTTEDTEAKK |
| | Cathepsin B sensitive site |
| 528 | XSSFDLDYDFQR |
| | Cathepsin B sensitive site |
| 529 | FQAGTSKPLHSSGINVNAAPF |
| | Cathepsin B sensitive site |
| 530 | HIGGPPGFASSSGKPGPTVIK |
| | Cathepsin B sensitive site |
| 531 | XSSGPGASSGTSGDHGELVVR |
| | Cathepsin B sensitive site |
| 532 | ELVSSSSSGSDSDSEVDKK |
| | Cathepsin B sensitive site |
| 533 | MDSTEPPYSQKR |
| | Cathepsin B sensitive site |
| 534 | VVVLMGSTSDLGHCEK |
| | Cathepsin B sensitive site |
| 535 | ILDSVGIEADDDRLNK |
| | Cathepsin B sensitive site |
| 536 | STQPISSVGKPASVIK |
| | Cathepsin B sensitive site |
| 537 | ALQSVGQIVGEVLK |
| | Cathepsin B sensitive site |
| 538 | VSSLAEGSVTSVGSVNPAENFR |
| | Cathepsin B sensitive site |
| 539 | TGSISSSVSVPAKPER |
| | Cathepsin B sensitive site |
| 540 | YXXXXXXYSQSYGGYENQK |
| | Cathepsin B sensitive site |
| 541 | IYWGTATTGKPHV |
| | Cathepsin B sensitive site |
| 542 | MVQTAVVPVKK |
| | Cathepsin B sensitive site |
| 543 | MMLGTEGGEGFVVK |
| | Cathepsin B sensitive site |
| 544 | XTFIAIKPDGVQR |
| | Cathepsin B sensitive site |
| 545 | VSHVSTGGGASLELLEGK |
| | Cathepsin B sensitive site |
| 546 | AAAAAGSGAGTGGGTASGGTEGGSAESEGAK |
| | Cathepsin B sensitive site |
| 547 | TIGNSCGTIGLIHAVANNQDK |
| | Cathepsin B sensitive site |
| 548 | TGEEIFGTIGMRPNAK |
| | Cathepsin B sensitive site |
| 549 | TTQFSCTLGEKFEETTADGR |
| | Cathepsin B sensitive site |
| 550 | GCTATLGNFAK |
| | Cathepsin B sensitive site |
| 551 | YVATLGVEVHPL |
| | Cathepsin B sensitive site |
| 552 | LAATNALLNSLEFTK |
| | Cathepsin B sensitive site |
| 553 | GPGASSGTSGDHGELVVR |
| | Cathepsin B sensitive site |
| 554 | STTTGHLIYK |
| | Cathepsin B sensitive site |
| 555 | ALSAADTKPGTTGSGAGSGGPGGLTSAAPAGGDKK |
| | Cathepsin B sensitive site |
| 556 | STTTGHLIYK |
| | Cathepsin B sensitive site |
| 557 | VTIIGPATVGGIKPGCFK |
| | Cathepsin B sensitive site |
| 558 | TVVFSHPPIGTVGLTEDEAIHK |
| | Cathepsin B sensitive site |
| 559 | GSPTSLGTWGSWIGPDHDK |
| | Cathepsin B sensitive site |
| 560 | GSPTSLGTWGSWIGPDHDKF |
| | Cathepsin B sensitive site |
| 561 | IHFPLATYAPVISAEK |
| | Cathepsin B sensitive site |
| 562 | ANPQVGVAFPHIK |
| | Cathepsin B sensitive site |
| 563 | TCTTVAFTQVNSEDK |
| | Cathepsin B sensitive site |
| 564 | VLTGVAGEDAECHAAK |
| | Cathepsin B sensitive site |
| 565 | NIPPYFVALVPQEEELDDQK |
| | Cathepsin B sensitive site |
| 566 | GQETAVAPSLVAPALNKPK |
| | Cathepsin B sensitive site |
| 567 | QGQETAVAPSLVAPALNKPK |
| | Cathepsin B sensitive site |
| 568 | GFVTFSSMAEVDAAMAARPH |
| | Cathepsin B sensitive site |
| 569 | VDYYTTTPALVFGKPVR |
| | Cathepsin B sensitive site |
| 570 | VDYYTTTPALVFGKPVR |
| | Cathepsin B sensitive site |
| 571 | ASQPXVDGFLVGGASLKPEFVDIINAK |
| | Cathepsin B sensitive site |
| 572 | TIIGPATVGGIKPGCFK |
| | Cathepsin B sensitive site |
| 573 | GGVDTAAVGGVFDVSNADR |
| | Cathepsin B sensitive site |
| 574 | TTVHAITATQK |
| | Cathepsin B sensitive site |
| 575 | EEVRPQDTVSVIGGVAGGSK |
| | Cathepsin B sensitive site |
| 576 | QVIGTGSFFPK |
| | Cathepsin B sensitive site |
| 577 | ASGNYATVISHNPETK |
| | Cathepsin B sensitive site |
| 578 | MKPLMGVIYVPLTDKEK |
| | Cathepsin B sensitive site |
| 579 | FSVCVLGDQQHCDEAK |
| | Cathepsin B sensitive site |
| 580 | ENAFCNLAAIVPDSVGRHSPA |
| | Cathepsin B sensitive site |
| 581 | AYVGNLPFNTVQGDIDAIFK |
| | Cathepsin B sensitive site |
| 582 | TLTTVQGIADDYDKK |
| | Cathepsin B sensitive site |
| 583 | CISXHVGQAGVQIGNACWE |
| | Cathepsin B sensitive site |
| 584 | THALQWPSLTVQWLPEVTKPEGK |
| | Cathepsin B sensitive site |
| 585 | ASVPAGGAVAVSAAPGSAAPAAGSAPAAAEEK |
| | Cathepsin B sensitive site |
| 586 | YEEVSVSGFEEFHR |
| | Cathepsin B sensitive site |
| 587 | CMTTVSWDGDKLQCVQK |
| | Cathepsin B sensitive site |
| 588 | MHGGGPTVTAGLPLPK |
| | Cathepsin B sensitive site |
| 589 | LALVTGGEIASTFDHPELVK |
| | Cathepsin B sensitive site |
| 590 | LEGTLLKPNMVTPGHACTQK |
| | Cathepsin B sensitive site |
| 591 | XVVESAYEVIK |
| | Cathepsin B sensitive site |
| 592 | ILAQVVGDVDTSLPR |
| | Cathepsin B sensitive site |
| 593 | CFSEMAPVCAVVGGILAQEIVK |
| | Cathepsin B sensitive site |
| 594 | ETEDTFXADLVVGLCTGQIK |
| | Cathepsin B sensitive site |
| 595 | EGPAVVGQFIQDVK |
| | Cathepsin B sensitive site |
| 596 | MLISGYALNCVVGSQGMPK |
| | Cathepsin B sensitive site |
| 597 | HWPFMVVNDAGRPK |
| | Cathepsin B sensitive site |
| 598 | SGPVVAMVWEGLNVVK |
| | Cathepsin B sensitive site |
| 599 | ALQDEWDAVMLHSFTLRQ |
| | Cathepsin B sensitive site |
| 600 | EYFSWEGAFQHVGK |
| | Cathepsin B sensitive site |
| 601 | ATVASGIPAGWMGLDCGPESSK |
| | Cathepsin B sensitive site |
| 602 | ATVASGIPAGWMGLDCGPESSKK |
| | Cathepsin B sensitive site |
| 603 | DCAFYDPTHAWSGGLDHQLK |
| | Cathepsin B sensitive site |
| 604 | QFQALLQYADPVSAQHAK |
| | Cathepsin B sensitive site |
| 605 | EQPQHPLHVTYAGAAVDELGK |
| | Cathepsin B sensitive site |
| 606 | TFSYAGFEMQPK |
| | Cathepsin B sensitive site |
| 607 | GYIWNYGAIPQTWEDPGHNDK |
| | Cathepsin B sensitive site |
| 608 | DYTGYNNYYGYGDYSNQQSGYGK |
| | Cathepsin B sensitive site |
| 609 | QSGYGGQTKPIFR |
| | Cathepsin B sensitive site |
| 610 | VPLIESGTAGYLGQVTTIKK |
| | Cathepsin B sensitive site |
| 611 | GILGYTEHQVVSSDFNSDTH |
| | Cathepsin B sensitive site |
| 612 | GILGYTEHQVVSSDFNSDTHSS |
| | Cathepsin B sensitive site |
| 613 | QTCVXHYTGMLEDGKK |
| | Cathepsin B sensitive site |
| 614 | QTCVXHYTGMLEDGKKFDS |
| | Cathepsin B sensitive site |
| 615 | AXYVTHLMK |
| | Cathepsin B sensitive site |
| 616 | KVSVR |
| | Cathepsin S sensitive site |
| 617 | TVGLR |
| | Cathepsin S sensitive site |
| 618 | PMGLP |
| | Cathepsin S sensitive site |
| 619 | PMGAP |
| | Cathepsin S sensitive site |
| 620 | MDLAAAAEPGAGSQHLEVR |
| | Cathepsin S sensitive site |
| 621 | EGAMVAATQGAAAAAGSGAGTGGGTASGGTEGGSAESEGAK |
| | Cathepsin S sensitive site |
| 622 | GTSFDAAATSGGSASSEK |
| | Cathepsin S sensitive site |
| 623 | AMVAATQGAAAAAGSGAGTGGGTASGGTEGGSAESEGAK |
| | Cathepsin S sensitive site |
| 624 | GILAADESTGSIAK |
| | Cathepsin S sensitive site |
| 625 | PAAPALSAADTKPGTTGSGAGSGGPGGLT |
| | Cathepsin S sensitive site |
| 626 | MVAATQGAAAAAGSGAGTGGGTASGGTEGGSAESEGAK |
| | Cathepsin S sensitive site |
| 627 | SSIQATTAAGSGHPTSCC |
| | Cathepsin S sensitive site |
| 628 | NEAIQAAHDAVAQEGQCR |
| | Cathepsin S sensitive site |
| 629 | QFGLPAEAVEAANKGDVEAFAK |
| | Cathepsin S sensitive site |
| 630 | LVIPNTLAVNAAQDSTDLVAK |
| | Cathepsin S sensitive site |
| 631 | EALAAMNAAQVKPLGK |
| | Cathepsin S sensitive site |
| 632 | APRPPVSAASGRPQDDTDSSR |
| | Cathepsin S sensitive site |
| 633 | GDPQEAKPQEAAVAPEKPPASDETK |
| | Cathepsin S sensitive site |
| 634 | EGDMIVCAAYAHELPK |
| | Cathepsin S sensitive site |
| 635 | GILAADESTGSIAK |
| | Cathepsin S sensitive site |
| 636 | PEEACSFILSADFPALVVK |
| | Cathepsin S sensitive site |
| 637 | GWNAYIDNLMADGTCQDAAIVGYK |
| | Cathepsin S sensitive site |
| 638 | YLAADKDGNVTCER |
| | Cathepsin S sensitive site |
| 639 | LPVDFVTADKFDENAK |
| | Cathepsin S sensitive site |
| 640 | TXEAEAAHGTVTR |
| | Cathepsin S sensitive site |
| 641 | TVFAEHISDECK |
| | Cathepsin S sensitive site |
| 642 | TVFAEHISDECKR |
| | Cathepsin S sensitive site |
| 643 | DLEAEHVEVEDTTLNR |
| | Cathepsin S sensitive site |
| 644 | CAEIAHNVSSK |
| | Cathepsin S sensitive site |
| 645 | EAAAAGGGVGAGAGGGCGPGGADSSKPR |
| | Cathepsin S sensitive site |
| 646 | YXLVGAGAIGCELLK |
| | Cathepsin S sensitive site |
| 647 | LIYAGKILNDDTALK |
| | Cathepsin S sensitive site |
| 648 | FGDNTAGCTSAGPHFNPLSR |
| | Cathepsin S sensitive site |
| 649 | IITLAGPTNAIFK |
| | Cathepsin S sensitive site |
| 650 | EIVHXQAGQCGNQIGAK |
| | Cathepsin S sensitive site |
| 651 | AICAGPTALLAHEIGFGSK |
| | Cathepsin S sensitive site |
| 652 | SHEHSPSDLEAHFVPLVK |
| | Cathepsin S sensitive site |
| 653 | ELQAHGADELLK |
| | Cathepsin S sensitive site |
| 654 | SWADLVNAHVVPGSGVVK |
| | Cathepsin S sensitive site |
| 655 | TFIAIKPDGVQR |
| | Cathepsin S sensitive site |
| 656 | GYIWNYGAIPQTWEDPGHNDK |
| | Cathepsin S sensitive site |
| 657 | ATATXXAKPQITNPK |
| | Cathepsin S sensitive site |
| 658 | TTETAQHAQGAKPQVQPQK |
| | Cathepsin S sensitive site |
| 659 | VASYLLAALGGNSSPSAK |
| | Cathepsin S sensitive site |
| 660 | IALPAPRGSGTASD |
| | Cathepsin S sensitive site |
| 661 | QIGNVAALPGIVHR |
| | Cathepsin S sensitive site |
| 662 | DGTVLCELINALYPEGQAPVK |
| | Cathepsin S sensitive site |
| 663 | DGTVLCELINALYPEGQAPVKK |
| | Cathepsin S sensitive site |
| 664 | DFTVSAMHGDMDQK |
| | Cathepsin S sensitive site |
| 665 | LVTDCVAAMNPDAVLR |
| | Cathepsin S sensitive site |
| 666 | HELQANCYEEVKDR |
| | Cathepsin S sensitive site |
| 667 | CSLQAAAILDANDAHQTETSSSQVK |
| | Cathepsin S sensitive site |
| 668 | SGLGRPQLQGAPAAEPMAVP |
| | Cathepsin S sensitive site |
| 669 | QETAVAPSLVAPALNKPK |
| | Cathepsin S sensitive site |
| 670 | AQXAAPASVPAQAPK |
| | Cathepsin S sensitive site |
| 671 | GETIFVTAPHEATAGIIGVNR |
| | Cathepsin S sensitive site |
| 672 | EYSSELNAPSQESDSHPR |
| | Cathepsin S sensitive site |
| 673 | DQVTAQEIFQDNHEDGPTAK |
| | Cathepsin S sensitive site |
| 674 | LHEEEIQELQAQIQEQHVQ |
| | Cathepsin S sensitive site |
| 675 | QQQRPLEAQPSAPGHSVK |
| | Cathepsin S sensitive site |
| 676 | AAHTANFLLNASGSTSTPAPSR |
| | Cathepsin S sensitive site |
| 677 | IXXXFLGASLKDEVLK |
| | Cathepsin S sensitive site |
| 678 | NVEEADAAMAASPHAVDGNTVELK |
| | Cathepsin S sensitive site |
| 679 | ALLVTASQCQQPAENK |
| | Cathepsin S sensitive site |
| 680 | QSSWGMMGMLASQQNQSGPSGNNQNQGNMQR |
| | Cathepsin S sensitive site |
| 681 | LPPGFSASSTVEKPSK |
| | Cathepsin S sensitive site |
| 682 | AAVPSGASTGIYEALE |
| | Cathepsin S sensitive site |
| 683 | LNCQVIGASVDSHFCH |
| | Cathepsin S sensitive site |
| 684 | GANQYTFHLEATENPGALIK |
| | Cathepsin S sensitive site |
| 685 | LSELTQQLAQATGKPPQYIAVH |
| | Cathepsin S sensitive site |
| 686 | AGEQEGAMVAATQGAAAAAGSGAGTGGGTASGGTEGGSAESEGAK |
| | Cathepsin S sensitive site |
| 687 | ISSIQATTAAGSGHPTSCC |
| | Cathepsin S sensitive site |
| 688 | GLGATTHPTAAVK |
| | Cathepsin S sensitive site |
| 689 | IEPPPLDAVIEAEHTLR |
| | Cathepsin S sensitive site |
| 690 | SXGLPVGAVINCADNTGAK |
| | Cathepsin S sensitive site |
| 691 | VNVANVGAVPSGQDNIHR |
| | Cathepsin S sensitive site |
| 692 | QFLECAQNQGDIK |
| | Cathepsin S sensitive site |
| 693 | GGLTDEAALSCCSDADPSTK |
| | Cathepsin S sensitive site |
| 694 | ILSCGEVIHVK |
| | Cathepsin S sensitive site |
| 695 | AIVDCGFEHPSEVQ |
| | Cathepsin S sensitive site |
| 696 | HYYEVSCHDQGLCR |
| | Cathepsin S sensitive site |
| 697 | MLVQCMQDQEHPSIR |
| | Cathepsin S sensitive site |
| 698 | DVVICPDASLEDAKK |
| | Cathepsin S sensitive site |
| 699 | SGYAFVDCPDEHWAMK |
| | Cathepsin S sensitive site |
| 700 | FVLCPECENPETDLHVNPK |
| | Cathepsin S sensitive site |
| 701 | IAILTCPFEPPKPK |
| | Cathepsin S sensitive site |
| 702 | IAILTCPFEPPKPK |
| | Cathepsin S sensitive site |
| 703 | AATEQYHQVLCPGPSQDDPLHPLNK |
| | Cathepsin S sensitive site |
| 704 | AIVICPTDEDLKDR |
| | Cathepsin S sensitive site |
| 705 | ATAHAQAQLGCPVIIHPGR |
| | Cathepsin S sensitive site |
| 706 | IIPGXMCQGGDFTR |
| | Cathepsin S sensitive site |
| 707 | IIPGXMCQGGDFTR |
| | Cathepsin S sensitive site |
| 708 | PALYWLSGLTCTEQNFISK |
| | Cathepsin S sensitive site |
| 709 | MTVGCVAGDEESYEVFK |
| | Cathepsin S sensitive site |
| 710 | ATVAFCDAQSTQEIHEK |
| | Cathepsin S sensitive site |
| 711 | NYGILADATEQVGQHK |
| | Cathepsin S sensitive site |
| 712 | LQDCEGLIVR |
| | Cathepsin S sensitive site |
| 713 | QISAGYXPVXDCHTAHIACK |
| | Cathepsin S sensitive site |
| 714 | QISAGYXPVXDCHTAHIACK |
| | Cathepsin S sensitive site |
| 715 | TGEPCCDWVGDEGAGHFVK |
| | Cathepsin S sensitive site |
| 716 | DATNVGDEGGFAPNILENK |
| | Cathepsin S sensitive site |
| 717 | NILDFPQHVSPSK |
| | Cathepsin S sensitive site |
| 718 | DHVVSDFSEHGSLK |
| | Cathepsin S sensitive site |
| 719 | ADNELSPECLDGAQHFLK |
| | Cathepsin S sensitive site |
| 720 | IQTLGYFPVGDGDFPHQK |
| | Cathepsin S sensitive site |
| 721 | DXQEXXXFLLDGLHEDLNR |
| | Cathepsin S sensitive site |
| 722 | MILIQDGSQNTNVDKPLR |
| | Cathepsin S sensitive site |
| 723 | FTISDHPQPIDPLLK |
| | Cathepsin S sensitive site |
| 724 | VNPTXFFDIAVDGEPLGR |
| | Cathepsin S sensitive site |
| 725 | YEDICPSTHNMDVPNIK |
| | Cathepsin S sensitive site |
| 726 | NGSIYNPEVLDITEETLHSR |
| | Cathepsin S sensitive site |
| 727 | QHIVNDMNPGNLH |
| | Cathepsin S sensitive site |
| 728 | MLLDSEQHPCQLK |
| | Cathepsin S sensitive site |
| 729 | EGLMLDSHEELYK |
| | Cathepsin S sensitive site |
| 730 | TAGDTHLGGEDFDNR |
| | Cathepsin S sensitive site |
| 731 | PGGLLLGDVAPNFEANTTVGR |
| | Cathepsin S sensitive site |
| 732 | NDGATILSMMDVDHQIAK |
| | Cathepsin S sensitive site |
| 733 | GEEGLTLNLEDVQPHDLGK |
| | Cathepsin S sensitive site |
| 734 | TIDNSQGAYQEAFDISKK |
| | Cathepsin S sensitive site |
| 735 | IVGFFDDSFSEAHSEFLK |
| | Cathepsin S sensitive site |
| 736 | QEEASGVALGEAPDHSYESLR |
| | Cathepsin S sensitive site |
| 737 | DPVQEAWAEDVDLR |
| | Cathepsin S sensitive site |
| 738 | PMIYICGECHTENEIK |
| | Cathepsin S sensitive site |
| 739 | HMSEFMECNLNELVK |
| | Cathepsin S sensitive site |
| 740 | MGYAEEAPYDAIHVG |
| | Cathepsin S sensitive site |
| 741 | MADQLTEEQIAEFK |
| | Cathepsin S sensitive site |
| 742 | YLAEFATGNDRK |
| | Cathepsin S sensitive site |
| 743 | LAELEEFINGPNNAHIQ |
| | Cathepsin S sensitive site |
| 744 | XEFTDHLVK |
| | Cathepsin S sensitive site |
| 745 | FCVGFLEGGKDSCQGDSGGPVVC |
| | Cathepsin S sensitive site |
| 746 | LLAEGHPDPDAELQR |
| | Cathepsin S sensitive site |
| 747 | GLTEGLHGFH |
| | Cathepsin S sensitive site |
| 748 | FVHWYVGEGMEEGEFSEAR |
| | Cathepsin S sensitive site |
| 749 | MLLHEGQHPAQLR |
| | Cathepsin S sensitive site |
| 750 | YHGYTFANLGEHEFVEEK |
| | Cathepsin S sensitive site |
| 751 | TVFAEHISDECK |
| | Cathepsin S sensitive site |
| 752 | VILEEHSTCENEVSK |
| | Cathepsin S sensitive site |
| 753 | LLTEIHGGAGGPSGR |
| | Cathepsin S sensitive site |
| 754 | AHLMEIQVNGGTVAEK |
| | Cathepsin S sensitive site |
| 755 | ISWLDANTLAEKDEFEHK |
| | Cathepsin S sensitive site |
| 756 | XEKFEDENFILK |
| | Cathepsin S sensitive site |
| 757 | SAVEAGSEVSEKPGQEAPVLPK |
| | Cathepsin S sensitive site |
| 758 | ILNEKPTTDEPEK |
| | Cathepsin S sensitive site |
| 759 | YLAEKYEWDVAEAR |
| | Cathepsin S sensitive site |
| 760 | CLELFXELAEDKENY |
| | Cathepsin S sensitive site |
| 761 | CLELFXELAEDKENYK |
| | Cathepsin S sensitive site |
| 762 | MEELHNQEVQK |
| | Cathepsin S sensitive site |
| 763 | GVNVAGVSLQELNPEMGTDNDSENWK |
| | Cathepsin S sensitive site |
| 764 | ASDIAMTELPPTHPIR |
| | Cathepsin S sensitive site |
| 765 | VVVAENFDEIVNNENK |
| | Cathepsin S sensitive site |
| 766 | IXEGCEEPATHNALAK |
| | Cathepsin S sensitive site |
| 767 | VTEQGAELSNEER |
| | Cathepsin S sensitive site |
| 768 | AVTEQGHELSNEER |
| | Cathepsin S sensitive site |
| 769 | QVDQEEPHVEEQQQQTPAENK |
| | Cathepsin S sensitive site |
| 770 | VVFEQTKVIADNVK |
| | Cathepsin S sensitive site |
| 771 | NIFVGENILEESENLHNADQPLR |
| | Cathepsin S sensitive site |
| 772 | LFIHESIHDEVVNR |
| | Cathepsin S sensitive site |
| 773 | VTNGIEEPLEESSHEPEPEPESETK |
| | Cathepsin S sensitive site |
| 774 | GIVEESVTGVHR |
| | Cathepsin S sensitive site |
| 775 | QCPSVVSLLSESYNPHVR |
| | Cathepsin S sensitive site |
| 776 | ASLQETHFDSTQTK |
| | Cathepsin S sensitive site |
| 777 | TFGETHPFTK |
| | Cathepsin S sensitive site |
| 778 | VMLGETNPADSKPGTIR |
| | Cathepsin S sensitive site |
| 779 | GADFLVTEVENGGSLGSK |
| | Cathepsin S sensitive site |
| 780 | LPTEAYISVEEVHDDGTPTSK |
| | Cathepsin S sensitive site |
| 781 | MEEVPHDCPGADSAQAGR |
| | Cathepsin S sensitive site |
| 782 | VDENCVGFDHTVKPV |
| | Cathepsin S sensitive site |
| 783 | VHVVPDQLMAFGGSSEPCALC |
| | Cathepsin S sensitive site |
| 784 | IWCFGPDGTGPNILT |
| | Cathepsin S sensitive site |
| 785 | YVXFGPHAGK |
| | Cathepsin S sensitive site |
| 786 | EFAGFQCQIQFGPHNEQK |
| | Cathepsin S sensitive site |
| 787 | KPXKPMQFLGDEETVRK |
| | Cathepsin S sensitive site |
| 788 | MVYMFQYDSTHGK |
| | Cathepsin S sensitive site |
| 789 | EELGFRPEYSASQLK |
| | Cathepsin S sensitive site |
| 790 | HLEFSHDQYR |
| | Cathepsin S sensitive site |
| 791 | TCGFDFTGAVEDISK |
| | Cathepsin S sensitive site |
| 792 | GFGFVDFNSEEDAK |
| | Cathepsin S sensitive site |
| 793 | NYGFVHIEDK |
| | Cathepsin S sensitive site |
| 794 | GFGFVTFDDHDPVDK |
| | Cathepsin S sensitive site |
| 795 | LPNFGFVVFDDSEPVQK |
| | Cathepsin S sensitive site |
| 796 | QLLCGAAIGTHEDDK |
| | Cathepsin S sensitive site |
| 797 | QLLCGAAIGTHEDDKYR |
| | Cathepsin S sensitive site |
| 798 | MTNGFSGADLTEICQR |
| | Cathepsin S sensitive site |
| 799 | VQGEVMEGADNQGAGEQGRPVR |
| | Cathepsin S sensitive site |
| 800 | MGGHGYGGAGDASSGFHGGHF |
| | Cathepsin S sensitive site |
| 801 | LGNVLGGLISGAGGGGGGGGGGGGGGGGGGGGTAMR |
| | Cathepsin S sensitive site |
| 802 | FGGSFAGSFGGAGGHAPGVAR |
| | Cathepsin S sensitive site |
| 803 | VLVVGAGGIGCELLK |
| | Cathepsin S sensitive site |
| 804 | VTADHGPAVSGAHNTIICAR |
| | Cathepsin S sensitive site |
| 805 | CEALAGAPLDNAPK |
| | Cathepsin S sensitive site |
| 806 | STGGAPTFNVTVTK |
| | Cathepsin S sensitive site |
| 807 | KGCDVVVIPAGVPR |
| | Cathepsin S sensitive site |
| 808 | FSPAGVEGCPALPHK |
| | Cathepsin S sensitive site |
| 809 | HSSLAGCQIINYR |
| | Cathepsin S sensitive site |
| 810 | SSEVGYDAMAGDFVNMVEK |
| | Cathepsin S sensitive site |
| 811 | SIEDSVISLSGDHCIIGR |
| | Cathepsin S sensitive site |
| 812 | VTGDHIPTPQDLPQR |
| | Cathepsin S sensitive site |
| 813 | NGDTFLGGEDFDQALLR |
| | Cathepsin S sensitive site |
| 814 | IVYICCGEDHTAALTK |
| | Cathepsin S sensitive site |
| 815 | MVDGNVSGEFTDLVPEK |
| | Cathepsin S sensitive site |
| 816 | MAAQGEPQVQFK |
| | Cathepsin S sensitive site |
| 817 | QALAVHLALQGESSSEHFLK |
| | Cathepsin S sensitive site |
| 818 | AFYNNVLGEYEEYITK |
| | Cathepsin S sensitive site |
| 819 | LLNQMDGFDTLHR |
| | Cathepsin S sensitive site |
| 820 | GLTEGLHGFHVHEFG |
| | Cathepsin S sensitive site |
| 821 | GLTEGLHGFHVHEFGDNTAGCT |
| | Cathepsin S sensitive site |
| 822 | AADSYFSLLQGFINSLDESTQESK |
| | Cathepsin S sensitive site |
| 823 | INPYLLGTMAGGAADCSFWER |
| | Cathepsin S sensitive site |
| 824 | QHDLFDSGFGGGAGVETGGK |
| | Cathepsin S sensitive site |
| 825 | TTHFVEGGDAGNREDQINR |
| | Cathepsin S sensitive site |
| 826 | SQPIAQQPLQGGDHSGNYGYK |
| | Cathepsin S sensitive site |
| 827 | GTDGTDNPLSGGDQYQNITVHR |
| | Cathepsin S sensitive site |
| 828 | GCITXIGGGDTATCCAK |
| | Cathepsin S sensitive site |
| 829 | WGSGGGGGGGGGGGGGGGGGGGGGGGGGGGRKSSSAAA |
| | Cathepsin S sensitive site |
| 830 | LAAGSLAAPGGGGGSAGGARP |
| | Cathepsin S sensitive site |
| 831 | GSXXXGGGSYNDFGNY |
| | Cathepsin S sensitive site |
| 832 | VNAANXSLLGGGGVDGCIHR |
| | Cathepsin S sensitive site |
| 833 | FCVGFLEGGKDSCQGDSGGPVVC |
| | Cathepsin S sensitive site |
| 834 | LVDGQIFCLHGGLSPSIDTLDHIR |
| | Cathepsin S sensitive site |
| 835 | MFXGGLSWDTSKK |
| | Cathepsin S sensitive site |
| 836 | DPQELLEGGNQGEGDPQAEGR |
| | Cathepsin S sensitive site |
| 837 | NMGGPYGGGNYGPGGSGGSGGYGGR |
| | Cathepsin S sensitive site |
| 838 | RGGPGGPGGPGGPMGR |
| | Cathepsin S sensitive site |
| 839 | SVLDDWFPLQGGQGQVHLR |
| | Cathepsin S sensitive site |
| 840 | IIMEYLGGGSALDLLR |
| | Cathepsin S sensitive site |
| 841 | SHFAMMHGGTGFAGIDSSSPEVK |
| | Cathepsin S sensitive site |
| 842 | QGFQLTHSLGGGTGSGMGTLLI |
| | Cathepsin S sensitive site |
| 843 | MADYLISGGTSYVPDDGLT |
| | Cathepsin S sensitive site |
| 844 | VTVAGGVHISGLH |
| | Cathepsin S sensitive site |
| 845 | VTVAGGVHISGLHT |
| | Cathepsin S sensitive site |
| 846 | VTVAGGVHISGLHTE |
| | Cathepsin S sensitive site |
| 847 | YAVSELAGHQTSAESWGTGR |
| | Cathepsin S sensitive site |
| 848 | TFQGHTNEVNAIK |
| | Cathepsin S sensitive site |
| 849 | GDGPVQGIINFEQK |
| | Cathepsin S sensitive site |
| 850 | VTIIGPATVGGIKPGCFK |
| | Cathepsin S sensitive site |
| 851 | FSLPGMEHVYGIPEHADNLR |
| | Cathepsin S sensitive site |
| 852 | LPPSGAVPVTGIPPHVVK |
| | Cathepsin S sensitive site |
| 853 | MDGIVPDIAVGTK |
| | Cathepsin S sensitive site |
| 854 | RGIWHNDNK |
| | Cathepsin S sensitive site |
| 855 | GKPEIEGKPESEGEPGSETR |
| | Cathepsin S sensitive site |
| 856 | YDINAHACVTGKPISQGGIHGR |
| | Cathepsin S sensitive site |
| 857 | ELTQQLAQATGKPPQYIAVH |
| | Cathepsin S sensitive site |
| 858 | NPKPFLNGLTGKPVMVK |
| | Cathepsin S sensitive site |
| 859 | CPSILGGLAPEKDQPK |
| | Cathepsin S sensitive site |
| 860 | VASGIPAGWXGLDCGPESSKK |
| | Cathepsin S sensitive site |
| 861 | QVLQGLDYLHSK |
| | Cathepsin S sensitive site |
| 862 | GALEGLPRPPPPVK |
| | Cathepsin S sensitive site |
| 863 | LFIGGLSFETTDESLR |
| | Cathepsin S sensitive site |
| 864 | VFVGGLSPDTSEEQIK |
| | Cathepsin S sensitive site |
| 865 | MFXGGLSWDTSKK |
| | Cathepsin S sensitive site |
| 866 | NVIIWGNHSSTQYPDVNHAK |
| | Cathepsin S sensitive site |
| 867 | LLSGLAEGLGGNIEQLVAR |
| | Cathepsin S sensitive site |
| 868 | LVINGNPITIFQER |
| | Cathepsin S sensitive site |
| 869 | SAAMLGNSEDHTALSR |
| | Cathepsin S sensitive site |
| 870 | IFQGNVHNFEK |
| | Cathepsin S sensitive site |
| 871 | NNPPTLEGNYSKPLK |
| | Cathepsin S sensitive site |
| 872 | MVGPAVIVDKK |
| | Cathepsin S sensitive site |
| 873 | MMLGPEGGEGFVVK |
| | Cathepsin S sensitive site |
| 874 | SIYEALGGPHDPNVAK |
| | Cathepsin S sensitive site |
| 875 | TFQGPNCPATCGR |
| | Cathepsin S sensitive site |
| 876 | IMGPNYTPGKK |
| | Cathepsin S sensitive site |
| 877 | MVIITGPPEAQFK |
| | Cathepsin S sensitive site |
| 878 | AFGLTDDQVSGPPSAPAEDR |
| | Cathepsin S sensitive site |
| 879 | TVQGPPTSDDIFER |
| | Cathepsin S sensitive site |
| 880 | FVIGGPQGDAGLTGR |
| | Cathepsin S sensitive site |
| 881 | IITLXGPTNAIFK |
| | Cathepsin S sensitive site |
| 882 | KPPTLIHGQAPSAGLPSQKPK |
| | Cathepsin S sensitive site |
| 883 | RGQGGYPGKPR |
| | Cathepsin S sensitive site |
| 884 | RPDNFXFGQSGAGNNWAK |
| | Cathepsin S sensitive site |
| 885 | GLLALSSALSGQSHLAIK |
| | Cathepsin S sensitive site |
| 886 | ALPPVLTTVNGQSPPEHSAPAK |
| | Cathepsin S sensitive site |
| 887 | QSGYGGQTKPIFR |
| | Cathepsin S sensitive site |
| 888 | LSGQTNIHLSK |
| | Cathepsin S sensitive site |
| 889 | VVLMSHLGRPDGVPMPDK |
| | Cathepsin S sensitive site |
| 890 | VVLMSHLGRPDGVPMPDKY |
| | Cathepsin S sensitive site |
| 891 | QQSIAGSADSKPIDVSR |
| | Cathepsin S sensitive site |
| 892 | VTLGPVPEIGGSEAPAPQNK |
| | Cathepsin S sensitive site |
| 893 | NFGGSFAGSFGGAGGHAPGVAR |
| | Cathepsin S sensitive site |
| 894 | mMDYLQGSGETPQTDVR |
| | Cathepsin S sensitive site |
| 895 | DSVWGSGGGQQSVNHLVK |
| | Cathepsin S sensitive site |
| 896 | PQVAIICGSGLGGLTDK |
| | Cathepsin S sensitive site |
| 897 | PTSSEQGGLEGSGSAAGEGKPALSEEER |
| | Cathepsin S sensitive site |
| 898 | TVEQLLTGSPTSPTVEPEKPTR |
| | Cathepsin S sensitive site |
| 899 | GCLEGSQGTQALHK |
| | Cathepsin S sensitive site |
| 900 | LLAVSAPALQGSRPGETEENVR |
| | Cathepsin S sensitive site |
| 901 | IXXGSSGAQGSGGGSTSAHY |
| | Cathepsin S sensitive site |
| 902 | VAFTGSTEVGHLIQK |
| | Cathepsin S sensitive site |
| 903 | VVVLMGSTSDLGHCEK |
| | Cathepsin S sensitive site |
| 904 | MVELLGSYTEDNASQAR |
| | Cathepsin S sensitive site |
| 905 | IYWGTATTGKPHVA |
| | Cathepsin S sensitive site |
| 906 | IVGFCWGGTAVHHLM |
| | Cathepsin S sensitive site |
| 907 | GVVPLAGTDGETTTQGLDGLSER |
| | Cathepsin S sensitive site |
| 908 | GXVXFXGTDHIDQWNK |
| | Cathepsin S sensitive site |
| 909 | SVSGTDVQEECR |
| | Cathepsin S sensitive site |
| 910 | MMLGTEGGEGFVVK |
| | Cathepsin S sensitive site |
| 911 | IAFHQDGSLAGTGGLDAFGR |
| | Cathepsin S sensitive site |
| 912 | LNFSHGTHEYHAETIK |
| | Cathepsin S sensitive site |
| 913 | LVLGTHTSDEQNHLV |
| | Cathepsin S sensitive site |
| 914 | ALHWLVLGTHTSDEQNHLVVAR |
| | Cathepsin S sensitive site |
| 915 | VLSGTIHAGQPVK |
| | Cathepsin S sensitive site |
| 916 | IITITGTQDQIQNAQY |
| | Cathepsin S sensitive site |
| 917 | GGTSDVEVNEK |
| | Cathepsin S sensitive site |
| 918 | VLTGVAGEDAECHAAK |
| | Cathepsin S sensitive site |
| 919 | TGGVDTAAVGGVFDVSNADR |
| | Cathepsin S sensitive site |
| 920 | FIVDGWHEMDAENPLH |
| | Cathepsin S sensitive site |
| 921 | TMFSSEVQFGHAGACANQASETAVAK |
| | Cathepsin S sensitive site |
| 922 | PIYDVLQMVGHANRPLQDDEGR |
| | Cathepsin S sensitive site |
| 923 | EWAHATIIPK |
| | Cathepsin S sensitive site |
| 924 | KHEANNPQLK |
| | Cathepsin S sensitive site |
| 925 | MVNHFIAEFK |
| | Cathepsin S sensitive site |
| 926 | LVXHFVEEFK |
| | Cathepsin S sensitive site |
| 927 | MPFPVNHGASSEDTLLK |
| | Cathepsin S sensitive site |
| 928 | NXCWELYCLEHGIQPDGQMPSDK |
| | Cathepsin S sensitive site |
| 929 | NXCWELYCLEHGIQPDGQMPSDK |
| | Cathepsin S sensitive site |
| 930 | VHAGPFANIAHGNSSIIADR |
| | Cathepsin S sensitive site |
| 931 | INQVFHGSCITEGNELTK |
| | Cathepsin S sensitive site |
| 932 | FELQHGTEEQQEEVR |
| | Cathepsin S sensitive site |
| 933 | EQQEAIEHIDEVQNEIDR |
| | Cathepsin S sensitive site |
| 934 | AVEALAAALAHISGATSVDQR |
| | Cathepsin S sensitive site |
| 935 | RHLAPTGNAPASR |
| | Cathepsin S sensitive site |
| 936 | LLTDFCTHLPNLPDSTAK |
| | Cathepsin S sensitive site |
| 937 | VDEFVTHNLSFDEINK |
| | Cathepsin S sensitive site |
| 938 | ATLELTHNWGTEDDETQSY |
| | Cathepsin S sensitive site |
| 939 | EEFTAFLHPEEYDYMK |
| | Cathepsin S sensitive site |
| 940 | QXFHPEQLITGK |
| | Cathepsin S sensitive site |
| 941 | PVTHNLPTVAHPSQAPSPNQPTK |
| | Cathepsin S sensitive site |
| 942 | AXXXXXQHQAGQAPHLG |
| | Cathepsin S sensitive site |
| 943 | CNFTDGALVQHQEWDGK |
| | Cathepsin S sensitive site |
| 944 | GVLHQFSGTETNK |
| | Cathepsin S sensitive site |
| 945 | QIGAVVSHQSSVIPDR |
| | Cathepsin S sensitive site |
| 946 | IEPNEVTHSGDTGVETDGR |
| | Cathepsin S sensitive site |
| 947 | HYAHTDCPGHADYVK |
| | Cathepsin S sensitive site |
| 948 | TICSHVQNMIK |
| | Cathepsin S sensitive site |
| 949 | LLGHWEEAAHDLA |
| | Cathepsin S sensitive site |
| 950 | TYTIANQFPLNK |
| | Cathepsin S sensitive site |
| 951 | NPTXFFDIAVDGEPLGR |
| | Cathepsin S sensitive site |
| 952 | LVSIGAEEIVDGNAK |
| | Cathepsin S sensitive site |
| 953 | TTDGVYEGVAIGGDRYPGSTF |
| | Cathepsin S sensitive site |
| 954 | THINIVVIGHVDSGK |
| | Cathepsin S sensitive site |
| 955 | DNDFCGTDMTIGTDSALHR |
| | Cathepsin S sensitive site |
| 956 | VLXNMEIGTSLFDEEGAK |
| | Cathepsin S sensitive site |
| 957 | VCTLAIIDPGDSDIIR |
| | Cathepsin S sensitive site |
| 958 | GCITIIGGGDTATCCAK |
| | Cathepsin S sensitive site |
| 959 | TFNQVEIKPEMIGH |
| | Cathepsin S sensitive site |
| 960 | CQLEINFNTLQTK |
| | Cathepsin S sensitive site |
| 961 | HLEINPDHPIVE |
| | Cathepsin S sensitive site |
| 962 | HLEINPDHSIIETLR |
| | Cathepsin S sensitive site |
| 963 | VPYLIAGIQHSCQDIGAK |
| | Cathepsin S sensitive site |
| 964 | VLSIQSHVIR |
| | Cathepsin S sensitive site |
| 965 | ELGITALHIK |
| | Cathepsin S sensitive site |
| 966 | LVAIVDPHIK |
| | Cathepsin S sensitive site |
| 967 | TLTIVDTGIGMTK |
| | Cathepsin S sensitive site |
| 968 | LVAIVDVIDQNR |
| | Cathepsin S sensitive site |
| 969 | QIILEKEETEELKR |
| | Cathepsin S sensitive site |
| 970 | XKHPDADSLY |
| | Cathepsin S sensitive site |
| 971 | CIGKPGGSLDNSEQK |
| | Cathepsin S sensitive site |
| 972 | HHIYLEGTLLKPNMVTPGHACTQK |
| | Cathepsin S sensitive site |
| 973 | LTQQLAQATGKPPQYIAVH |
| | Cathepsin S sensitive site |
| 974 | SSPPELPDVMKPQDSGSSANEQAVQ |
| | Cathepsin S sensitive site |
| 975 | LQELEKYPGIQTR |
| | Cathepsin S sensitive site |
| 976 | WIGLDLSNGKPR |
| | Cathepsin S sensitive site |
| 977 | MPFLELDTNLPANR |
| | Cathepsin S sensitive site |
| 978 | ETALLSSGFSLEDPQTHANR |
| | Cathepsin S sensitive site |
| 979 | EAFSLFDKDGDGTITTK |
| | Cathepsin S sensitive site |
| 980 | YELGRPAANTK |
| | Cathepsin S sensitive site |
| 981 | GNPICSLHDQGAGGNGNVLK |
| | Cathepsin S sensitive site |
| 982 | VILHLKEDQTEYLEER |
| | Cathepsin S sensitive site |
| 983 | IQQLCEDIIQLKPDVVITEK |
| | Cathepsin S sensitive site |
| 984 | IQQLCEDIIQLKPDVVITEK |
| | Cathepsin S sensitive site |
| 985 | TLNNDIMLIK |
| | Cathepsin S sensitive site |
| 986 | NQVALNPQNTVFDAK |
| | Cathepsin S sensitive site |
| 987 | NQVALNPQNTVFDAK |
| | Cathepsin S sensitive site |
| 988 | STATLAWGVNLPAHTVIIK |
| | Cathepsin S sensitive site |
| 989 | EXLELPEDEEEKK |
| | Cathepsin S sensitive site |
| 990 | GVNLPGAAVDLPAVSEK |
| | Cathepsin S sensitive site |
| 991 | RLPPAAGDEP |
| | Cathepsin S sensitive site |
| 992 | LDLPPYETF |
| | Cathepsin S sensitive site |
| 993 | DGDSVMVLPTIPEEEAKK |
| | Cathepsin S sensitive site |
| 994 | EIVHLQAGQCGNQIGAK |
| | Cathepsin S sensitive site |
| 995 | DVSIEDSVISLSGDHCIIGR |
| | Cathepsin S sensitive site |
| 996 | SSAPGPLELDLTGDLESFKK |
| | Cathepsin S sensitive site |
| 997 | FLEMCNDLLAR |
| | Cathepsin S sensitive site |
| 998 | TTGFGMIYDSLDYAK |
| | Cathepsin S sensitive site |
| 999 | XMNPTNTVFDAK |
| | Cathepsin S sensitive site |
| 1000 | EDAMAMVDHCLK |
| | Cathepsin S sensitive site |
| 1001 | ANXVXSGGXTMYPGIADR |
| | Cathepsin S sensitive site |
| 1002 | ALQDLENAASGDAAVHQR |
| | Cathepsin S sensitive site |
| 1003 | DPVINLNNAFEVAEK |
| | Cathepsin S sensitive site |
| 1004 | XNAGPNTNGSQFF |
| | Cathepsin S sensitive site |
| 1005 | NYSVFYYEIQNAPEQACH |
| | Cathepsin S sensitive site |
| 1006 | ELISNASDALDKIR |
| | Cathepsin S sensitive site |
| 1007 | YYFNHITNASQWERPSGNSSSGGK |
| | Cathepsin S sensitive site |
| 1008 | TNDWEDHLAVK |
| | Cathepsin S sensitive site |
| 1009 | AFHNEAQVNPERK |
| | Cathepsin S sensitive site |
| 1010 | NCLTNFHGMDLTR |
| | Cathepsin S sensitive site |
| 1011 | TNVANFPGHSGPIT |
| | Cathepsin S sensitive site |
| 1012 | ILNNGHAFNVEFDDSQDK |
| | Cathepsin S sensitive site |
| 1013 | IEQLQNHENEDIYK |
| | Cathepsin S sensitive site |
| 1014 | PVFVHAGPFANIAHGNSSIIADR |
| | Cathepsin S sensitive site |
| 1015 | VWYVSNIDGTHIAK |
| | Cathepsin S sensitive site |
| 1016 | CDEVMQLLLENLGNENVHR |
| | Cathepsin S sensitive site |
| 1017 | QDQRPLHPVANPHAEISTK |
| | Cathepsin S sensitive site |
| 1018 | XNPLDAGAAEPI |
| | Cathepsin S sensitive site |
| 1019 | LIPQLVANVTNPNSTEHMK |
| | Cathepsin S sensitive site |
| 1020 | SAAMLGNSEDHTALSR |
| | Cathepsin S sensitive site |
| 1021 | NYQQNYQNSESGEKNEGSESAPEGQAQQR |
| | Cathepsin S sensitive site |
| 1022 | LGEMWNNTAADDKQPYEK |
| | Cathepsin S sensitive site |
| 1023 | IMQNTDPHSQEYVEHLK |
| | Cathepsin S sensitive site |
| 1024 | ILIANTGMDTDKIK |
| | Cathepsin S sensitive site |
| 1025 | AWVWNTHADFADECPKPELL |
| | Cathepsin S sensitive site |
| 1026 | DHASIQMNVAEVDKVTGR |
| | Cathepsin S sensitive site |
| 1027 | ALANVNIGSLIC |
| | Cathepsin S sensitive site |
| 1028 | EHGXXTNWDDMEK |
| | Cathepsin S sensitive site |
| 1029 | SAAQAAAQTNSNAAGK |
| | Cathepsin S sensitive site |
| 1030 | EETFEAAMLGQAEEVVQER |
| | Cathepsin S sensitive site |
| 1031 | PPYDEQTQAFIDAAQEAR |
| | Cathepsin S sensitive site |
| 1032 | LEQGQAIDDLMPAQK |
| | Cathepsin S sensitive site |
| 1033 | SLHQAIEGDTSGDFLK |
| | Cathepsin S sensitive site |
| 1034 | QLQQAQAAGAEQEVEK |
| | Cathepsin S sensitive site |
| 1035 | YLEVVLNTLQQASQAQVDK |
| | Cathepsin S sensitive site |
| 1036 | YLEVVLNTLQQASQAQVDK |
| | Cathepsin S sensitive site |
| 1037 | FLSELTQQLAQATGKPPQYI |
| | Cathepsin S sensitive site |
| 1038 | FLSELTQQLAQATGKPPQYIA |
| | Cathepsin S sensitive site |
| 1039 | FLSELTQQLAQATGKPPQYIAVH |
| | Cathepsin S sensitive site |
| 1040 | MTSMGQATWSDPHK |
| | Cathepsin S sensitive site |
| 1041 | EELGLIEQAYDNPHEALSR |
| | Cathepsin S sensitive site |
| 1042 | SLGTIQQCCDAIDHLCR |
| | Cathepsin S sensitive site |
| 1043 | AAAAAAQQQQQCGGGGATKPAVSGK |
| | Cathepsin S sensitive site |
| 1044 | NSCNQCNEPRPEDSR |
| | Cathepsin S sensitive site |
| 1045 | VLIAFAQYLQQCPFEDHVK |
| | Cathepsin S sensitive site |
| 1046 | DSLLQDGEFSMDLR |
| | Cathepsin S sensitive site |
| 1047 | YFLGSIVNFSQDPDVHFK |
| | Cathepsin S sensitive site |
| 1048 | VFSWLQQEGHLSEEEMAR |
| | Cathepsin S sensitive site |
| 1049 | VMSQEIQEQLHK |
| | Cathepsin S sensitive site |
| 1050 | KQEPVKPEEGR |
| | Cathepsin S sensitive site |
| 1051 | LWYCDLQQESSGIAGILK |
| | Cathepsin S sensitive site |
| 1052 | KQEYDESGPSIVHR |
| | Cathepsin S sensitive site |
| 1053 | ETEAICFFVQQFTDMEHNR |
| | Cathepsin S sensitive site |
| 1054 | VTEQGAELSNEER |
| | Cathepsin S sensitive site |
| 1055 | AYMGNVLQGGEGQAPTR |
| | Cathepsin S sensitive site |
| 1056 | AVTEQGHELSNEER |
| | Cathepsin S sensitive site |
| 1057 | VAHTFVVDVAQGTQVTGR |
| | Cathepsin S sensitive site |
| 1058 | VGQGYPHDPPK |
| | Cathepsin S sensitive site |
| 1059 | IYAVEASTMAQHAEVLVK |
| | Cathepsin S sensitive site |
| 1060 | TLAIYFEVVNQHNAPIPQGGR |
| | Cathepsin S sensitive site |
| 1061 | ELAQIAGRPTEDEDEKEK |
| | Cathepsin S sensitive site |
| 1062 | MDEMATTQISKDELDELK |
| | Cathepsin S sensitive site |
| 1063 | YPHLGQKPGGSDFLR |
| | Cathepsin S sensitive site |
| 1064 | TMLELLNQLDGFQPNTQVK |
| | Cathepsin S sensitive site |
| 1065 | ILLELLNQMDGFDQNVNVK |
| | Cathepsin S sensitive site |
| 1066 | LLNQMDGFDTLHR |
| | Cathepsin S sensitive site |
| 1067 | FQESAEAILGQNAAYLGELK |
| | Cathepsin S sensitive site |
| 1068 | HPCFIIAEIGQNHQGDLDVAK |
| | Cathepsin S sensitive site |
| 1069 | LLQDHPWLLSQNLVVKPDQLIK |
| | Cathepsin S sensitive site |
| 1070 | ALPAVQQNNLDEDLIRK |
| | Cathepsin S sensitive site |
| 1071 | ALGQNPTNAEVLK |
| | Cathepsin S sensitive site |
| 1072 | NYQQNYQNSESGEK |
| | Cathepsin S sensitive site |
| 1073 | NYQQNYQNSESGEKNEGSESAPEGQAQQR |
| | Cathepsin S sensitive site |
| 1074 | CGAPSATQPATAETQHIADQVR |
| | Cathepsin S sensitive site |
| 1075 | QAAAAAAQQQQQCGGGGATKPAVSGK |
| | Cathepsin S sensitive site |
| 1076 | IDVTDFLSMTQQDSHAPLR |
| | Cathepsin S sensitive site |
| 1077 | IGSCTQQDVELHVQK |
| | Cathepsin S sensitive site |
| 1078 | LFPLNQQDVPDKFK |
| | Cathepsin S sensitive site |
| 1079 | IGQQPQQPGAPPQQDYTK |
| | Cathepsin S sensitive site |
| 1080 | HQAAAAAAQQQQQCGGGGATKPAVSGK |
| | Cathepsin S sensitive site |
| 1081 | MFTQQQPQELAR |
| | Cathepsin S sensitive site |
| 1082 | LQQQQRPEDAEDGAEGGGK |
| | Cathepsin S sensitive site |
| 1083 | LQQQQRPEDAEDGAEGGGKR |
| | Cathepsin S sensitive site |
| 1084 | SSEADMECLNQRPPENPDTDK |
| | Cathepsin S sensitive site |
| 1085 | SSEADMECLNQRPPENPDTDKNVQ |
| | Cathepsin S sensitive site |
| 1086 | NVNPESQLIQQSEQSESETAGSTK |
| | Cathepsin S sensitive site |
| 1087 | PDNFXFGQSGAGNNWAK |
| | Cathepsin S sensitive site |
| 1088 | SQTCEFNMIEQSGPPHEPR |
| | Cathepsin S sensitive site |
| 1089 | SAVLPPEDMSQSGPSGSHPQGPR |
| | Cathepsin S sensitive site |
| 1090 | IEFLQSHENQEIYQK |
| | Cathepsin S sensitive site |
| 1091 | NTVSQSISGDPEIDKK |
| | Cathepsin S sensitive site |
| 1092 | LLIHQSLAGGIIGVK |
| | Cathepsin S sensitive site |
| 1093 | MVXYLANLTQSQIALNEK |
| | Cathepsin S sensitive site |
| 1094 | PPKPEPFQFGQSSQKPPVAGGK |
| | Cathepsin S sensitive site |
| 1095 | NGNYCVLQMDQSYKPDENEVR |
| | Cathepsin S sensitive site |
| 1096 | ILVGDVGQTVDDPYATFVK |
| | Cathepsin S sensitive site |
| 1097 | ADDVDLEQVANETHGHVG |
| | Cathepsin S sensitive site |
| 1098 | ADDVDLEQVANETHGHVGA |
| | Cathepsin S sensitive site |
| 1099 | SINFLHQVCHDQTPTTK |
| | Cathepsin S sensitive site |
| 1100 | CTTVAFTQVNSEDKGALAK |
| | Cathepsin S sensitive site |
| 1101 | QQLQQVPGLLHR |
| | Cathepsin S sensitive site |
| 1102 | SQQYPAARPAEP |
| | Cathepsin S sensitive site |
| 1103 | DFCIQVGRNIIHGSDSVK |
| | Cathepsin S sensitive site |
| 1104 | VLMSHLGRPDGVPMPDKY |
| | Cathepsin S sensitive site |
| 1105 | VLMSHLGRPDGVPMPDKYS |
| | Cathepsin S sensitive site |
| 1106 | AQVARPGGDTIFGK |
| | Cathepsin S sensitive site |
| 1107 | FMSVQRPGPYDRPGTAR |
| | Cathepsin S sensitive site |
| 1108 | VLVERSAAETVTK |
| | Cathepsin S sensitive site |
| 1109 | FLPSARSSPASSPE |
| | Cathepsin S sensitive site |
| 1110 | RPELGSEGLGSAAHGSQPDLR |
| | Cathepsin S sensitive site |
| 1111 | MPDQGMTSADDFFQGTK |
| | Cathepsin S sensitive site |
| 1112 | DVPAPSTSADKVESLDVDSEAK |
| | Cathepsin S sensitive site |
| 1113 | QVCLPVISAENWKPATK |
| | Cathepsin S sensitive site |
| 1114 | GFGSGDDPYSSAEPHVSGVK |
| | Cathepsin S sensitive site |
| 1115 | EFGDNTAGCTSAGPHFNPLSR |
| | Cathepsin S sensitive site |
| 1116 | TYFSCTSAHTSTGDGTAMITR |
| | Cathepsin S sensitive site |
| 1117 | TYSLGSALRPSTSR |
| | Cathepsin S sensitive site |
| 1118 | VSDQELQSANASVDDSR |
| | Cathepsin S sensitive site |
| 1119 | APGSAAPAAGSAPAAAEEK |
| | Cathepsin S sensitive site |
| 1120 | APGSAAPAAGSAPAAAEEK |
| | Cathepsin S sensitive site |
| 1121 | APGSAAPAAGSAPAAAEEK |
| | Cathepsin S sensitive site |
| 1122 | APGSAAPAAGSAPAAAEEKK |
| | Cathepsin S sensitive site |
| 1123 | NEGSESAPEGQAQQR |
| | Cathepsin S sensitive site |
| 1124 | QVEPLDPPAGSAPGEHVFVK |
| | Cathepsin S sensitive site |
| 1125 | PTGEAGPSCSSASDKLPR |
| | Cathepsin S sensitive site |
| 1126 | YYTSASGDEMVSLK |
| | Cathepsin S sensitive site |
| 1127 | NQQGAHSALSSASTSSHNLQ |
| | Cathepsin S sensitive site |
| 1128 | EALLSSAVDHGSDEVK |
| | Cathepsin S sensitive site |
| 1129 | DYMVEIDILASCDHPNIVK |
| | Cathepsin S sensitive site |
| 1130 | MESCGIHETTF |
| | Cathepsin S sensitive site |
| 1131 | QLSSCLPNIVPK |
| | Cathepsin S sensitive site |
| 1132 | LIXSDGHEFIVK |
| | Cathepsin S sensitive site |
| 1133 | EIVDGGVILESDPQQVVHR |
| | Cathepsin S sensitive site |
| 1134 | SLEDALSSDTSGHFR |
| | Cathepsin S sensitive site |
| 1135 | VGVEAHVDIHSDVPKGANSF |
| | Cathepsin S sensitive site |
| 1136 | VILGSEAAQQHPEEVR |
| | Cathepsin S sensitive site |
| 1137 | XSEDKGALAK |
| | Cathepsin S sensitive site |
| 1138 | GGTSXXSSEGTQHSYSEEEK |
| | Cathepsin S sensitive site |
| 1139 | CALGGTSELSSEGTQHSYSEEEKY |
| | Cathepsin S sensitive site |
| 1140 | MDPNIVGSEHYDVAR |
| | Cathepsin S sensitive site |
| 1141 | SPAPSSVPLGSEKPSNVSQDR |
| | Cathepsin S sensitive site |
| 1142 | MTQAGVEELESENKIPATQK |
| | Cathepsin S sensitive site |
| 1143 | MLLDSEQHPCQLK |
| | Cathepsin S sensitive site |
| 1144 | GLGNVLGGLISGAGGGGGGGGGGGGGGGGGGGGTAMR |
| | Cathepsin S sensitive site |
| 1145 | Im DDLTEVLCSGAGGVHSGGSGDGAGSGGPGAQNHVK |
| | Cathepsin S sensitive site |
| 1146 | ATQGAAAAAGSGAGTGGGTASGGTEGGSAESEGAK |
| | Cathepsin S sensitive site |
| 1147 | LEPAPLDSLCSGASAEEPTSHR |
| | Cathepsin S sensitive site |
| 1148 | VIGSGCNLDSAR |
| | Cathepsin S sensitive site |
| 1149 | WXLNSGDGAFYGPK |
| | Cathepsin S sensitive site |
| 1150 | FFDMAYQGFASGDGDKDAWAVR |
| | Cathepsin S sensitive site |
| 1151 | VSIEDSVISLSGDHCIIGR |
| | Cathepsin S sensitive site |
| 1152 | EYLLSGDISEAEHCLK |
| | Cathepsin S sensitive site |
| 1153 | DDGLFSGDPNWFPK |
| | Cathepsin S sensitive site |
| 1154 | WQHDLFDSGFGGGAGVETGGK |
| | Cathepsin S sensitive site |
| 1155 | DSVWGSGGGQQSVNHLVK |
| | Cathepsin S sensitive site |
| 1156 | PEGPNEAEVTSGKPEQEVPDAEEEK |
| | Cathepsin S sensitive site |
| 1157 | VQSGNINAAK |
| | Cathepsin S sensitive site |
| 1158 | YQYGGLNSGRPVTPPR |
| | Cathepsin S sensitive site |
| 1159 | VLQATVVAVGSGSKGKGGEIQPVSVK |
| | Cathepsin S sensitive site |
| 1160 | GILFVGSGVSGGEEGAR |
| | Cathepsin S sensitive site |
| 1161 | IEFLQSHENQEIYQK |
| | Cathepsin S sensitive site |
| 1162 | LDEVITSHGAIEPDKDNVR |
| | Cathepsin S sensitive site |
| 1163 | EHPVIESHPDNALEDLR |
| | Cathepsin S sensitive site |
| 1164 | LIQSHPESAEDLQEK |
| | Cathepsin S sensitive site |
| 1165 | TIVITSHPGQIVK |
| | Cathepsin S sensitive site |
| 1166 | IEWLESHQDADIEDFK |
| | Cathepsin S sensitive site |
| 1167 | GYPHLCSICDLPVHSNK |
| | Cathepsin S sensitive site |
| 1168 | SEPCALCSLHSIGKIGGAQNR |
| | Cathepsin S sensitive site |
| 1169 | LQSIGTENTEENR |
| | Cathepsin S sensitive site |
| 1170 | LFIHESIHDEVVNR |
| | Cathepsin S sensitive site |
| 1171 | VTFNINNSIPPTFDGEEEPSQGQK |
| | Cathepsin S sensitive site |
| 1172 | NLNTLCWAIGSISGAMHEEDEKR |
| | Cathepsin S sensitive site |
| 1173 | EASATNSPCTSKPATPAPSEK |
| | Cathepsin S sensitive site |
| 1174 | PPNPNCYVCASKPEVTVR |
| | Cathepsin S sensitive site |
| 1175 | ICSKPVVLPK |
| | Cathepsin S sensitive site |
| 1176 | QFHFHWGSLDGQGSEHTVDK |
| | Cathepsin S sensitive site |
| 1177 | QFHFHWGSLDGQGSEHTVDKK |
| | Cathepsin S sensitive site |
| 1178 | GNPICSLHDQGAGGNGNVLK |
| | Cathepsin S sensitive site |
| 1179 | EANFTVSSMHGDMPQK |
| | Cathepsin S sensitive site |
| 1180 | NQLTSNPENTVFDAK |
| | Cathepsin S sensitive site |
| 1181 | QVLVGSYCVFSNQGGLVHPK |
| | Cathepsin S sensitive site |
| 1182 | DLQSNVEHLTEK |
| | Cathepsin S sensitive site |
| 1183 | EEMQSNVEVVHTYR |
| | Cathepsin S sensitive site |
| 1184 | APVQPQQSPAAAPGGTDEKPSGK |
| | Cathepsin S sensitive site |
| 1185 | APVQPQQSPAAAPGGTDEKPSGK |
| | Cathepsin S sensitive site |
| 1186 | NDGPVTIELESPAPGTATSDPK |
| | Cathepsin S sensitive site |
| 1187 | INSLFLTDLYSPEYPGPSHR |
| | Cathepsin S sensitive site |
| 1188 | NGSLDSPGKQDTEEDEEEDEKDK |
| | Cathepsin S sensitive site |
| 1189 | SAAAASAASGSPGPGEGSAGGEKR |
| | Cathepsin S sensitive site |
| 1190 | SAAAASAASGSPGPGEGSAGGEKR |
| | Cathepsin S sensitive site |
| 1191 | NADTDLVSWLSPHDPNSVVTK |
| | Cathepsin S sensitive site |
| 1192 | LSPPYSSPQEFAQDVGR |
| | Cathepsin S sensitive site |
| 1193 | IIAFVGSPVEDNEKDLVK |
| | Cathepsin S sensitive site |
| 1194 | MESQEPTESSQNGK |
| | Cathepsin S sensitive site |
| 1195 | AXASQLDCNFLK |
| | Cathepsin S sensitive site |
| 1196 | SQGDSISSQLGPIHPPPR |
| | Cathepsin S sensitive site |
| 1197 | LGGLLKPTVASQNQNLPVAK |
| | Cathepsin S sensitive site |
| 1198 | SSWGMMGMLASQQNQSGPSGNNQNQGNMQR |
| | Cathepsin S sensitive site |
| 1199 | DEYLINSQTTEHIVK |
| | Cathepsin S sensitive site |
| 1200 | YQLGLAYGYNSQYDEAVAQFSK |
| | Cathepsin S sensitive site |
| 1201 | GLLLLSVVVTSRPEAFQPH |
| | Cathepsin S sensitive site |
| 1202 | RPASVSSSAAVEHEQR |
| | Cathepsin S sensitive site |
| 1203 | FGIVTSSAGTGTTEDTEAK |
| | Cathepsin S sensitive site |
| 1204 | FGIVTSSAGTGTTEDTEAKK |
| | Cathepsin S sensitive site |
| 1205 | STASAPAAVNSSASADKPLSNMK |
| | Cathepsin S sensitive site |
| 1206 | EALLSSAVDHGSDEVK |
| | Cathepsin S sensitive site |
| 1207 | VSWLEYESSFSNEEAQK |
| | Cathepsin S sensitive site |
| 1208 | IXXGSSGAQGSGGGSTSAHY |
| | Cathepsin S sensitive site |
| 1209 | HIGGPPGFASSSGKPGPTVIK |
| | Cathepsin S sensitive site |
| 1210 | FEMYEPSELESSHLTDQDNEIR |
| | Cathepsin S sensitive site |
| 1211 | SPDDDLGSSNWEAADLGNEER |
| | Cathepsin S sensitive site |
| 1212 | GDSQVSSNPTSSPPGEAPAPVSVDSEPS |
| | Cathepsin S sensitive site |
| 1213 | FVNGQPRPLESSQVKYLR |
| | Cathepsin S sensitive site |
| 1214 | KPLTSSSAAPQRPISTQR |
| | Cathepsin S sensitive site |
| 1215 | IHIGGPPGFASSSGKPGPTVIK |
| | Cathepsin S sensitive site |
| 1216 | ELVSSSSSGSDSDSEVDKK |
| | Cathepsin S sensitive site |
| 1217 | LLDSSTVTHLFK |
| | Cathepsin S sensitive site |
| 1218 | PPPAAPPPSSSSVPEAGGPPIKK |
| | Cathepsin S sensitive site |
| 1219 | YVELFLNSTAGASGGAYEHR |
| | Cathepsin S sensitive site |
| 1220 | SHELSDFGLESTAGEIPVVAIR |
| | Cathepsin S sensitive site |
| 1221 | ECEEEAINIQSTAPEEEHESPR |
| | Cathepsin S sensitive site |
| 1222 | EGTGSTATSSSSTAGAAGK |
| | Cathepsin S sensitive site |
| 1223 | PLHSIISSTESVQGSTSK |
| | Cathepsin S sensitive site |
| 1224 | VAFTGSTEVGHLIQK |
| | Cathepsin S sensitive site |
| 1225 | LALVTGGEIASTFDHPELVK |
| | Cathepsin S sensitive site |
| 1226 | ATIELCSTHANDASALR |
| | Cathepsin S sensitive site |
| 1227 | VHITLSTHECAGLSER |
| | Cathepsin S sensitive site |
| 1228 | EEEEPQAPQESTPAPPKK |
| | Cathepsin S sensitive site |
| 1229 | SITILSTPEGTSAACK |
| | Cathepsin S sensitive site |
| 1230 | ETLASSDSFASTQPTHSWK |
| | Cathepsin S sensitive site |
| 1231 | VVVLMGSTSDLGHCEK |
| | Cathepsin S sensitive site |
| 1232 | VLLSNLSSTSHVPEVDPGSAELQK |
| | Cathepsin S sensitive site |
| 1233 | LFDSTTLEHQK |
| | Cathepsin S sensitive site |
| 1234 | TQLEGLQSTVTGHVER |
| | Cathepsin S sensitive site |
| 1235 | GSESGGSAVDSVAGEHSVSGR |
| | Cathepsin S sensitive site |
| 1236 | YEILQSVDDAAIVIK |
| | Cathepsin S sensitive site |
| 1237 | NDLSICGTLHSVDQYLNIK |
| | Cathepsin S sensitive site |
| 1238 | ILDSVGIEADDDR |
| | Cathepsin S sensitive site |
| 1239 | ILDSVGIEADDDRLNK |
| | Cathepsin S sensitive site |
| 1240 | IYVASVHQDLSDDDIK |
| | Cathepsin S sensitive site |
| 1241 | ELQSVKPQEAPK |
| | Cathepsin S sensitive site |
| 1242 | HYTEGAELVDSVLDVVRK |
| | Cathepsin S sensitive site |
| 1243 | LAEGSVTSVGSVNPAENFR |
| | Cathepsin S sensitive site |
| 1244 | GSPTSLGTWGSWIGPDHDK |
| | Cathepsin S sensitive site |
| 1245 | VLNSYWVGEDSTYK |
| | Cathepsin S sensitive site |
| 1246 | SLGTADVHFER |
| | Cathepsin S sensitive site |
| 1247 | MAGTAFDFENMK |
| | Cathepsin S sensitive site |
| 1248 | VLATAFDTTLGGR |
| | Cathepsin S sensitive site |
| 1249 | VELFLNSTAGASGGAYEHR |
| | Cathepsin S sensitive site |
| 1250 | APPPSGSAVSTAPQQKPIGK |
| | Cathepsin S sensitive site |
| 1251 | SQIFSTASDNQPTVTIK |
| | Cathepsin S sensitive site |
| 1252 | IYWGTATTGKPHVA |
| | Cathepsin S sensitive site |
| 1253 | MMLGTEGGEGFVVK |
| | Cathepsin S sensitive site |
| 1254 | FGAVWTGDNTAEWDHLK |
| | Cathepsin S sensitive site |
| 1255 | VSHVSTGGGASLELL |
| | Cathepsin S sensitive site |
| 1256 | VSHVSTGGGASLELLE |
| | Cathepsin S sensitive site |
| 1257 | VSHVSTGGGASLELLEGK |
| | Cathepsin S sensitive site |
| 1258 | ILISLATGHREEGGENLDQAR |
| | Cathepsin S sensitive site |
| 1259 | TLDQCIQTGVDNPGHPFIK |
| | Cathepsin S sensitive site |
| 1260 | SGFTLDDVIQTGVDNPGHPY |
| | Cathepsin S sensitive site |
| 1261 | DLTTGYDDSQPDKK |
| | Cathepsin S sensitive site |
| 1262 | FFFGTHETAFLGPK |
| | Cathepsin S sensitive site |
| 1263 | FPSLLTHNENMVAK |
| | Cathepsin S sensitive site |
| 1264 | YEDICPSTHNMDVPNIK |
| | Cathepsin S sensitive site |
| 1265 | DYALHWLVLGTHTSDEQNHLVVAR |
| | Cathepsin S sensitive site |
| 1266 | FGTINIVHPK |
| | Cathepsin S sensitive site |
| 1267 | SMVNTKPEKTEEDSEEVR |
| | Cathepsin S sensitive site |
| 1268 | VTLLTPAGATGSGGGTSGDSSKGEDKQDR |
| | Cathepsin S sensitive site |
| 1269 | PGETLTEILETPATSEQEAEHQR |
| | Cathepsin S sensitive site |
| 1270 | NSVQTPVENSTNSQHQVK |
| | Cathepsin S sensitive site |
| 1271 | AXXITPVPGGVGPMTV |
| | Cathepsin S sensitive site |
| 1272 | STVLTPMFVETQASQGTLQTR |
| | Cathepsin S sensitive site |
| 1273 | TFTTQETITNAETAK |
| | Cathepsin S sensitive site |
| 1274 | SPVSTRPLPSASQK |
| | Cathepsin S sensitive site |
| 1275 | TNEQWQMSLGTSEDHQHFT |
| | Cathepsin S sensitive site |
| 1276 | QEIIXQLDVITSEYEKEK |
| | Cathepsin S sensitive site |
| 1277 | LLAFLLAELGTSGSIDGNNQLVIK |
| | Cathepsin S sensitive site |
| 1278 | LXNMEIGTSLFDEEGAK |
| | Cathepsin S sensitive site |
| 1279 | AEKPAETPVATSPTATDSTSGDSSR |
| | Cathepsin S sensitive site |
| 1280 | LLETTDRPDGHQNNLR |
| | Cathepsin S sensitive site |
| 1281 | AQTITSEXXSTTTTTHITK |
| | Cathepsin S sensitive site |
| 1282 | ADAVGMSTVPEVIVAR |
| | Cathepsin S sensitive site |
| 1283 | IHFPLATYAPVISAEK |
| | Cathepsin S sensitive site |
| 1284 | DTXVXXDTYNCDLHFK |
| | Cathepsin S sensitive site |
| 1285 | VVIGMDVAASEFFR |
| | Cathepsin S sensitive site |
| 1286 | GXXXXXIGLXVADLAESIMK |
| | Cathepsin S sensitive site |
| 1287 | ANPQVGVAFPHIK |
| | Cathepsin S sensitive site |
| 1288 | PQEAKPQEAAVAPEKPPASDETK |
| | Cathepsin S sensitive site |
| 1289 | HFSVEGQLEFR |
| | Cathepsin S sensitive site |
| 1290 | VATLGVEVHPLVFH |
| | Cathepsin S sensitive site |
| 1291 | HWPFQVINDGDKPK |
| | Cathepsin S sensitive site |
| 1292 | LPVPAFNVINGGSHAGNK |
| | Cathepsin S sensitive site |
| 1293 | EVANGIESLGVKPDLPPPPSK |
| | Cathepsin S sensitive site |
| 1294 | TYYDVLGVKPNATQEELKK |
| | Cathepsin S sensitive site |
| 1295 | ETVAVKPTENNEEEFTSK |
| | Cathepsin S sensitive site |
| 1296 | SLLVNPEGPTLMR |
| | Cathepsin S sensitive site |
| 1297 | NWMNSLGVNPHVNHLY |
| | Cathepsin S sensitive site |
| 1298 | HGLLVPNNTTDQELQHIR |
| | Cathepsin S sensitive site |
| 1299 | QELEFLEVQEEYIKDEQK |
| | Cathepsin S sensitive site |
| 1300 | LEGTLLKPNMVTPGHACTQK |
| | Cathepsin S sensitive site |
| 1301 | FVNVVPTFGKK |
| | Cathepsin S sensitive site |
| 1302 | EDLVFIFWAPESAPLK |
| | Cathepsin S sensitive site |
| 1303 | AIYIDASCLTWEGQQFQGK |
| | Cathepsin S sensitive site |
| 1304 | EQPQHPLHVTYAGAAVDELGK |
| | Cathepsin S sensitive site |
| 1305 | SPDGHLFQVEYAQEAVKK |
| | Cathepsin S sensitive site |
| 1306 | NYKPPAQK |
| | Cathepsin S sensitive site |
| 1307 | VYNYNHLMPTR |
| | Cathepsin S sensitive site |
| 1308 | LAEAELEYNPEHVSR |
| | Cathepsin S sensitive site |
| 1309 | MPYQYPALTPEQK |
| | Cathepsin S sensitive site |
| 1310 | TSSANNPNLMYQDECDRR |
| | Cathepsin S sensitive site |
| 1311 | VGINYQPPTVVPGGDLAK |
| | Cathepsin S sensitive site |
| 1312 | YMACCXLYRGDVVPK |
| | Cathepsin S sensitive site |
| 1313 | SYCYVSKEELK |
| | Cathepsin S sensitive site |
| 1314 | AAGCTTAGCGGCCGCACCATGCGGGTCACGGCGCCCCGAACC |
| | (sec sense primer) |
| 1315 | CTGCAGGGAGCCGGCCCAGGTCTCGGTCAG |
| | (sec antisense primer) |
| 1316 | GGATCCATCGTGGGCATTGTTGCTGGCCTGGCT |
| | (MITD sense primer) |
| 1317 | GAATTCAGTCTCGAGTCAAGCTGTGAGAGACACATCAGAGCC |
| | (MITD antisense primer) |
| 1318 | [sequence omitted] |
| | (ubiquitin) |
| 1319 | 5′^{7Me}GₚₚₚG_{2′OMe}GGAAAUAAGAGAGAAAAGAAGAGUAAGAAGAAAUAUAAGAGCCACCAUGCCCCACAGUA |
| | GCCUCCACCCCAGCAUCCCCUGCCCCAGAGGCCACGGCGCACAGAAGGCCGCCCUGGUGCUGCUGAGCGCC |
| | UGUCUGGUGACCCUGUGGGGUCUGGGCGAGCCCCCCGAGCACACCCUGCGGUACCUCGUGCUGCAUCUG |
| | GCCAGCCUGCAGCUGGGCCUGCUGCUGAACGGCGUGUGCAGCCUGGCCGAAGAGCUGAGACACAUCCACA |
| | GCAGAUACAGAGGCUCCUACUGGAGAACCGUCAGAGCCUGCCUCGGCUGUCCCCUGAGAAGAGGCGCCCU |
| | GCUGCUCCUGAGCAUCUACUUCUACUACAGCCUGCCCAACGCCGUGGGCCCCCCCUUCACCUGGAUGCUG |
| | GCCCUGCUGGGCCUGAGCCAGGCCCUGAACAUCCUGCUGGGCCUGAAGGGCUUGGCCCCCGCCGAGAUCU |
| | CCGCCGUGUGCGAGAAGGGCAACUUCAACAUGGCCCAUGGCCUUGCCUGGUCCUACUACAUCGGCUACCU |
| | GAGACUGAUCCUGCCCGAGCUGCAGGCCAGAAUCAGAACCUACAACCAGCACUACAACAACCUGCUGAGAG |
| | GCGCCGUGAGCCAAAGACUGUACAUCCUGCUGCCCCUGGACUGCGGCGUGCCCGACAACCUUAGCAUGGC |
| | CGACCCCAACAUCAGAUUCCUGGACAAGCUGCCCCAGCAGACCGGCGACCACGCCGGCAUCAAGGACAGAG |
| | UGUACAGCAACAGCAUCUACGAGCUGCUGGAGAACGGCCAGAGAGCCGGCACCUGCGUGCUGGAGUACGC |
| | CACCCCCCUGCAGACCCUGUUCGCCAUGAGCCAGUACAGCCAGGCCGGCUUCAGCAGAGAGGACAGACUG |
| | GAGCAAGCCAAGCUGUUCUGCAGAACCCUGGAGGACAUCCUGGCGGACGCCCCCGAGAGCCAAAACAACU |
| | GCAGACUGAUCGCCUACCAGGAGCCCGCCGACGACAGCAGCUUCAGCCUGAGCCAGGAAGUGCUGAGACA |
| | CCUGAGACAGGAAGAGAAGGAGGAGGUGACCGUGGGAAGCCUGAAGACCAGCGCCGUGCCCAGCACCAGC |
| | ACCAUGAGCCAGGAGCCCGAGCUGCUGAUCAGCGGCAUGGAGAAGCCCCUGCCCCUGAGAACCGACUUCA |
| | GCUGAUAAUAGGCUGGAGCCUCGGUGGCCUAGCUUCUUGCCCCUUGGGCCUCCCCCCAGCCCCUCCUCCC |
| | CUUCCUGCACCCGUACCCCCCAAACACCAUUGUCACACUCCAGUGGUCUUUGAAUAAAGUCUGAGUGGGC |
| | GGCAAAAAAAAAAAAAAAAAAAAAAAAAAAAAAAAAAAAAAAAAAAAAAAAAAAAAAAAAAAAAAAAAAAA |
| | AAAAAAAAAAAAAAAAAAAAAAAAAAAAAAAAUCUAG0H3′ |
| | Where: A,C G & U = AMP, CMP, GMP & N1-ψUMP, respectively; Me = methyl; p = inorganic |
| | phosphate; underline = miR-122 binding site |
| | (STING mRNA sequence; CX-012871) |
| 1320 | AUGCCCCACAGUAGCCUCCACCCCAGCAUCCCCUGCCCCAGAGGCCACGGCGCACAGAAGGCCGCCCUGGU |
| | GCUGCUGAGCGCCUGUCUGGUGACCCUGUGGGGUCUGGGCGAGCCCCCCGAGCACACCCUGCGGUACCUC |
| | GUGCUGCAUCUGGCCAGCCUGCAGCUGGGCCUGCUGCUGAACGGCGUGUGCAGCCUGGCCGAAGAGCUG |
| | AGACACAUCCACAGCAGAUACAGAGGCUCCUACUGGAGAACCGUCAGAGCCUGCCUCGGCUGUCCCCUGA |
| | GAAGAGGCGCCCUGCUGCUCCUGAGCAUCUACUUCUACUACAGCCUGCCCAACGCCGUGGGCCCCCCCUUC |
| | ACCUGGAUGCUGGCCCUGCUGGGCCUGAGCCAGGCCCUGAACAUCCUGCUGGGCCUGAAGGGCUUGGCC |
| | CCCGCCGAGAUCUCCGCCGUGUGCGAGAAGGGCAACUUCAACAUGGCCCAUGGCCUUGCCUGGUCCUACU |
| | ACAUCGGCUACCUGAGACUGAUCCUGCCCGAGCUGCAGGCCAGAAUCAGAACCUACAACCAGCACUACAAC |
| | AACCUGCUGAGAGGCGCCGUGAGCCAAAGACUGUACAUCCUGCUGCCCCUGGACUGCGGCGUGCCCGACA |
| | ACCUUAGCAUGGCCGACCCCAACAUCAGAUUCCUGGACAAGCUGCCCCAGCAGACCGGCGACCACGCCGGC |
| | AUCAAGGACAGAGUGUACAGCAACAGCAUCUACGAGCUGCUGGAGAACGGCCAGAGAGCCGGCACCUGCG |
| | UGCUGGAGUACGCCACCCCCCUGCAGACCCUGUUCGCCAUGAGCCAGUACAGCCAGGCCGGCUUCAGCAG |
| | AGAGGACAGACUGGAGCAAGCCAAGCUGUUCUGCAGAACCCUGGAGGACAUCCUGGCGGACGCCCCCGAG |
| | AGCCAAAACAACUGCAGACUGAUCGCCUACCAGGAGCCCGCCGACGACAGCAGCUUCAGCCUGAGCCAGGA |
| | AGUGCUGAGACACCUGAGACAGGAAGAGAAGGAGGAGGUGACCGUGGGAAGCCUGAAGACCAGCGCCGU |
| | GCCCAGCACCAGCACCAUGAGCCAGGAGCCCGAGCUGCUGAUCAGCGGCAUGGAGAAGCCCCUGCCCCUGA |
| | GAACCGACUUCAGC |
| | (huSTING(V155M); no epitope tag; nucleotide sequence) |
| 1321 | 5′^{7Me}GₚₚₚG_{2′OMe}GGAAAUAAGAGAGAAAAGAAGAGUAAGAAGAAAUAUAAGAGCCACCAUGACCGAGUACA |
| | AGCUCGUGGUCGUCGGCGCCGACGGGGUAGGCAAGUCCGCUCUGACCAUUCAGCUCAUCCAGAUGACGG |
| | AGUACAAACUCGUGGUAGUGGGAGCCGUGGGUGUGGGCAAGAGCGCGCUCACCAUCCAACUCAUCCAAA |
| | UGACCGAAUAUAAACUCGUCGUGGUGGGAGCCGGCGACGUGGGAAAGAGCGCCCUUACCAUCCAGUUAA |
| | UCCAGAUGACAGAAUACAAGCUGGUGGUGGUCGGUGCCUGCGGCGUGGGUAAGUCCGCCCUGACAAUCC |
| | AGCUGAUCCAGUGAUAAUAGGCUGGAGCCUCGGUGGCCAUGCUUCUUGCCCCUUGGGCCUCCCCCCAGCC |
| | CCUCCUCCCCUUCCUGCACCCGUACCCCCGUGGUCUUUGAAUAAAGUCUGAGUGGGCGGCAAAAAAAAAA |
| | AAAAAAAAAAAAAAAAAAAAAAAAAAAAAAAAAAAAAAAAAAAAAAAAAAAAAAAAAAAAAAAAAAAAAAA |
| | AAAAAAAAAAAAAAAAAAAUCUAG_{OH}3′ |
| | Where: A,C G & U = AMP, CMP, GMP & N1-ψUMP, respectively; Me = methyl; p = inorganic |
| | phosphate |
| | (KRAS concatemer mRNA sequence; CX-012908) |
| 1322 | AUGACCGAGUACAAGCUCGUGGUCGUCGGCGCCGACGGGGUAGGCAAGUCCGCUCUGACCAUUCAGCUC |
| | AUCCAGAUGACGGAGUACAAACUCGUGGUAGUGGGAGCCGUGGGUGUGGGCAAGAGCGCGCUCACCAUC |
| | CAACUCAUCCAAAUGACCGAAUAUAAACUCGUCGUGGUGGGAGCCGGCGACGUGGGAAAGAGCGCCCUU |
| | ACCAUCCAGUUAAUCCAGAUGACAGAAUACAAGCUGGUGGUGGUCGGUGCCUGCGGCGUGGGUAAGUCC |
| | GCCCUGACAAUCCAGCUGAUCCAG |
| | (KRAS(G12D G12V G13D G12C) 100 mer “4MUT” nt. seq) |
| 1323 | GGAAAUAAGAGAGAAAAGAAGAGUAAGAAGAAAUAUAAGAGCCACC |
| | (5′ UTR) |
| 1324 | CCUUAGCAGAGCUGUGGAGUGUGACAAUGGUGUUUGUGUCUAAACUAUCAAACGCCAUUAUCACACUAA |
| | AUAGCUACUGCUAGGC |
| | (miR-122) |
| 1325 | UAUUUAGUGUGAUAAUGGCGUU |
| | (miR-122-3p binding site) |
| 1326 | CAAACACCAUUGUCACACUCCA |
| | (miR-122-5p binding site) |
| 1327 | MENLKHIITLGQVIHKRCEEMKYCKKQCRRLGHRVLGLIKPLEMLQDQGKRSVPSEKLTTAMNRFKAALEEANGEIE |
| | KFSNRSNICRFLTASQDKILFKDVNRKLSDVWKELSLLLQVEQRMPVSPISQGASWAQEDQQDADEDRRAFQMLR |
| | RDNEKIEASLRRLEINMKEIKETLRQY |
| | (human MLKL(1-180) ORF amino acid sequence; no epitope tag) |
| 1328 | MDKLGQIIKLGQLIYEQCEKMKYCRKQCQRLGNRVHGLLQPLQRLQAQGKKNLPDDITAALGRFDEVLKEANQQIE |
| | KFSKKSHIWKFVSVGNDKILFHEVNEKLRDVWEELLLLLQVYHWNTVSDVSQPASWQQEDRQDAEEDGNENMKV |
| | ILMQLQISVEEINKTLKQCSLKPTQEIPQD |
| | (mouse MLKL(1-180) ORF amino acid sequence; no epitope tag) |
| 1329 | MSSVKLWPTGASAVPLVSREELKKLEFVGKGGFGVVFRAHHRTWNHDVAVKIVNSKKISWEVKAMVNLRNENVLL |
| | LLGVTEDLQWDFVSGQALVTRFMENGSLAGLLQPECPRPWPLLCRLLQEVVLGMCYLHSLNPPLLHRDLKPSNILLD |
| | PELHAKLADFGLSTFQGGSQSGSGSGSGSRDSGGTLAYLDPELLFDVNLKASKASDVYSFGILVWAVLAGREAELVD |
| | KTSLIRETVCDRQSRPPLTELPPGSPETPGLEKLKELMIHCWGSQSENRPSFQDCEPKTNEVYNLVKDKVDAAVSEVK |
| | HYLSQHRSSGRNLSAREPSQRGTEMDCPRETMVSKMLDRLHLEEPSGPVPGKCPERQAQDTSVGPATPARTSSDP |
| | VAGTPQIPHTLPFRGTTPGPVFTETPGPHPQRNQGDGRHGTPWYPWTPPNPMTGPPALVFNNgvqvetispgdgrtf |
| | pkrgqtcvvhytgmledgkkVdssrdrnkpfkfmlgkqevirgweegvaqmsvgqrakltispdyaygatghpgiipphatlvfdvellkleg |
| | vqvetispgdgrtfpkrgqtcvvhytgmledgkkVdssrdrnkpfkfmlgkqevirgweegvaqmsvgqrakltispdyaygatghpgiipp |
| | hatlvfdvelllde |
| | (muRIPK3ΔC-2xFV; TH1001 with no epitope tag) |
| 1330 | MSSVKLWPTGASAVPLVSREELKKLEFVGKGGFGVVFRAHHRTWNHDVAVKIVNSKKISWEVKAMVNLRNENVLL |
| | LLGVTEDLQWDFVSGQALVTRFMENGSLAGLLQPECPRPWPLLCRLLQEVVLGMCYLHSLNPPLLHRDLKPSNILLD |
| | PELHAKLADFGLSTFQGGSQSGSGSGSGSRDSGGTLAYLDPELLFDVNLKASKASDVYSFGILVWAVLAGREAELVD |
| | KTSLIRETVCDRQSRPPLTELPPGSPETPGLEKLKELMIHCWGSQSENRPSFQDCEPKTNEVYNLVKDKVDAAVSEVK |
| | HYLSQHRSSGRNLSAREPSQRGTEMDCPRETMVSKMLDRLHLEEPSGPVPGKCPERQAQDTSVGPATPARTSSDP |
| | VAGTPQIPHTLPFRGTTPGPVFTETPGPHPQRNQGDGRHGTPWYPWTPPNPMTGPPALVFNNggggsggggsKKRL |
| | AYAIIQFLHDQLRHGGLSSDAQESLEVAIQCLETAFGVTVEDSDLALKKRLAYAIIQFLHDQLRHGGLSSDAQESLEVAI |
| | QCLETAFGVTVEDSDLAL |
| | (muRIPK3ΔC-2xSGTA.DM; TH1003 with no epitope tag) |
| 1331 | MSSVKLWPTGASAVPLVSREELKKLEFVGKGGFGVVFRAHHRTWNHDVAVKIVNSKKISWEVKAMVNLRNENVLL |
| | LLGVTEDLQWDFVSGQALVTRFMENGSLAGLLQPECPRPWPLLCRLLQEVVLGMCYLHSLNPPLLHRDLKPSNILLD |
| | PELHAKLADFGLSTFQGGSQSGSGSGSGSRDSGGTLAYLDPELLFDVNLKASKASDVYSFGILVWAVLAGREAELVD |
| | KTSLIRETVCDRQSRPPLTELPPGSPETPGLEKLKELMIHCWGSQSENRPSFQDCEPKTNEVYNLVKDKVDAAVSEVK |
| | HYLSQHRSSGRNLSAREPSQRGTEMDCPRETMVSKMLDRLHLEEPSGPVPGKCPERQAQDTSVGPATPARTSSDP |
| | VAGTPQIPHTLPFRGTTPGPVFTETPGPHPQRNQGDGRHGTPWYPWTPPNPMTGPPALVFNNggggsggggsGA |
| | MEPENKYLPELMAEKDSLDPSFTHAMQLLTAEIEKIQKGGAMEPENKYLPELMAEKDSLDPSFTHAMQLLTAEIEKI |
| | QKG |
| | (muRIPK3ΔC-2xSrc.DM; TH1005 no epitope tag) |
| 1332 | MSCVKLWPSGAPAPLVSIEELENQELVGKGGFGTVFRAQHRKWGYDVAVKIVNSKAISREVKAMASLDNEFVLRLE |
| | GVIEKVNWDQDPKPALVTKFMENGSLSGLLQSQCPRPWPLLCRLLKEVVLGMFYLHDQNPVLLHRDLKPSNVLLDP |
| | ELHVKLADFGLSTFQGGSQSGTGSGEPGGTLGYLAPELFVNVNRKASTASDVYSFGILMWAVLAGREVELPTEPSLV |
| | YEAVCNRQNRPSLAELPQAGPETPGLEGLKELMQLCWSSEPKDRPSFQECLPKTDEVFQMVENNMNAAVSTVKDF |
| | LSQLRSSNRRFSIPESGQGGTEMDGFRRTIENQHSRNDVMVSEWLNKLNLEEPPSSVPKKCPSLTKRSRAQEEQVP |
| | QAVVTAGTSSDSMAQPPQTPETSTFRNQMPSPTSTGTPSPGPRGNQGAERQGMNWSCRTPEPNPVTGRPLVNTF |
| | GVQVETISPGDGRTFPKRGQTCVVHYTGMLEDGKKVDSSRDRNKPFKFMLGKQEVIRGWEEGVAQMSVGQRAKL |
| | TISPDYAYGATGHPGIIPPHATLVFDVELLKLETRGVQVETISPGDGRTFPKRGQTCVVHYTGMLEDGKKVDSSRDRN |
| | KPFKFMLGKQEVIRGWEEGVAQMSVGQRAKLTISPDYAYGATGHPGIIPPHATLVFDVELLKLETS |
| | (huRIPK3.del.C-2xFv; TH1007 with no epitope tag) |
| 1333 | MSCVKLWPSGAPAPLVSIEELENQELVGKGGFGTVFRAQHRKWGYDVAVKIVNSKAISREVKAMASLDNEFVLRLE |
| | GVIEKVNWDQDPKPALVTKFMENGSLSGLLQSQCPRPWPLLCRLLKEVVLGMFYLHDQNPVLLHRDLKPSNVLLDP |
| | ELHVKLADFGLSTFQGGSQSGTGSGEPGGTLGYLAPELFVNVNRKASTASDVYSFGILMWAVLAGREVELPTEPSLV |
| | YEAVCNRQNRPSLAELPQAGPETPGLEGLKELMQLCWSSEPKDRPSFQECLPKTDEVFQMVENNMNAAVSTVKDF |
| | LSQLRSSNRRFSIPESGQGGTEMDGFRRTIENQHSRNDVMVSEWLNKLNLEEPPSSVPKKCPSLTKRSRAQEEQVP |
| | QAWTAGTSSDSMAQPPQTPETSTFRNQMPSPTSTGTPSPGPRGNQGAERQGMNWSCRTPEPNPVTGRPLVNTF |
| | (huRIPK3.del.C; TH1008 with no epitope tag) |
| 1334 | MSSVKLWPTGASAVPLVSREELKKLEFVGKGGFGVVFRAHHRTWNHDVAVKIVNSKKISWEVKAMVNLRNENVLL |
| | LLGVTEDLQWDFVSGQALVTRFMENGSLAGLLQPECPRPWPLLCRLLQEVVLGMCYLHSLNPPLLHRDLKPSNILLD |
| | PELHAKLADFGLSTFQGGSQSGSGSGSGSRDSGGTLAYLDPELLFDVNLKASKASDVYSFGILVWAVLAGREAELVD |
| | KTSLIRETVCDRQSRPPLTELPPGSPETPGLEKLKELMIHCWGSQSENRPSFQDCEPKTNEVYNLVKDKVDAAVSEVK |
| | HYLSQHRSSGRNLSAREPSQRGTEMDCPRETMVSKMLDRLHLEEPSGPVPGKCPERQAQDTSVGPATPARTSSDP |
| | VAGTPQIPHTLPFRGTTPGPVFTETPGPHPQRNQGDGRHGTPWYPWTPPNPMTGPPALVFNN |
| | (muRIPK3.del.C; TH1009 with no epitope tag) |
| 1335 | MSSVKLWPTGASAVPLVSREELKKLEFVGKGGFGVVFRAHHRTWNHDVAVKIVNSKKISWEVKAMVNLRNENVLL |
| | LLGVTEDLQWDFVSGQALVTRFMENGSLAGLLQPECPRPWPLLCRLLQEVVLGMCYLHSLNPPLLHRDLKPSNILLD |
| | PELHAKLADFGLSTFQGGSQSGSGSGSGSRDSGGTLAYLDPELLFDVNLKASKASDVYSFGILVWAVLAGREAELVD |
| | KTSLIRETVCDRQSRPPLTELPPGSPETPGLEKLKELMIHCWGSQSENRPSFQDCEPKTNEVYNLVKDKVDAAVSEVK |
| | HYLSQHRSSGRNLSAREPSQRGTEMDCPRETMVSKMLDRLHLEEPSGPVPGKCPERQAQDTSVGPATPARTSSDP |
| | VAGTPQIPHTLPFRGTTPGPVFTETPGPHPQRNQGDGRHGTPWYPWTPPNPMTGPPALVFNNCSEVQIGNYNSL |
| | VAPPRTTASSSAKYDQAQFGRGRGWQPFHKggggsggggsKKRLAYAIIQFLHDQLRHGGLSSDAQESLEVAIQCLET |
| | AFGVTVEDSDLALKKRLAYAIIQFLHDQLRHGGLSSDAQESLEVAIQCLETAFGVTVEDSDLAL |
| | (muRIPK3-2xSGTA.DM; TH1010 with no epitope tag) |
| 1336 | MSSVKLWPTGASAVPLVSREELKKLEFVGKGGFGVVFRAHHRTWNHDVAVKIVNSKKISWEVKAMVNLRNENVLL |
| | LLGVTEDLQWDFVSGQALVTRFMENGSLAGLLQPECPRPWPLLCRLLQEVVLGMCYLHSLNPPLLHRDLKPSNILLD |
| | PELHAKLADFGLSTFQGGSQSGSGSGSGSRDSGGTLAYLDPELLFDVNLKASKASDVYSFGILVWAVLAGREAELVD |
| | KTSLIRETVCDRQSRPPLTELPPGSPETPGLEKLKELMIHCWGSQSENRPSFQDCEPKTNEVYNLVKDKVDAAVSEVK |
| | HYLSQHRSSGRNLSAREPSQRGTEMDCPRETMVSKMLDRLHLEEPSGPVPGKCPERQAQDTSVGPATPARTSSDP |
| | VAGTPQIPHTLPFRGTTPGPVFTETPGPHPQRNQGDGRHGTPWYPWTPPNPMTGPPALVFNNCSEVQIGNYNSL |
| | VAPPRTTASSSAKYDQAQFGRGRGWQPFHKggggsggggsGAMEPENKYLPELMAEKDSLDPSFTHAMQLLTAEIEK |
| | IQKGGAMEPENKYLPELMAEKDSLDPSFTHAMQLLTAEIEKIQKG |
| | (muRIPK3-2xSrc.DM; TH1011 with no epitope tag) |
| 1337 | MSSVKLWPTGASAVPLVSREELKKLEFVGKGGFGVVFRAHHRTWNHDVAVKIVNSKKISWEVKAMVNLRNENVLL |
| | LLGVTEDLQWDFVSGQALVTRFMENGSLAGLLQPECPRPWPLLCRLLQEVVLGMCYLHSLNPPLLHRDLKPSNILLD |
| | PELHAKLADFGLSTFQGGSQSGSGSGSGSRDSGGTLAYLDPELLFDVNLKASKASDVYSFGILVWAVLAGREAELVD |
| | KTSLIRETVCDRQSRPPLTELPPGSPETPGLEKLKELMIHCWGSQSENRPSFQDCEPKTNEVYNLVKDKVDAAVSEVK |
| | HYLSQHRSSGRNLSAREPSQRGTEMDCPRETMVSKMLDRLHLEEPSGPVPGKCPERQAQDTSVGPATPARTSSDP |
| | VAGTPQIPHTLPFRGTTPGPVFTETPGPHPQRNQGDGRHGTPWYPWTPPNPMTGPPALVFNNCSEVQIGNYNSL |
| | VAPPRTTASSSAKYDQAQFGRGRGWQPFHKgvqvetispgdgrtfpkrgqtcvvhytgmledgkkVdssrdrnkpfkfmlgkqe |
| | virgweegvaqmsvgqrakltispdyaygatghpgiipphatlvfdvellklegvqvetispgdgrtfpkrgqtcvvhytgmledgkkVdssrd |
| | rnkpfkfmlgkqevirgweegvaqmsvgqrakltispdyaygatghpgiipphatlvfdvellkle |
| | (muRIPK3-2xFV; TH1012 with no epitope tag) |
| 1338 | MSCVKLWPSGAPAPLVSIEELENQELVGKGGFGTVFRAQHRKWGYDVAVKIVNSKAISREVKAMASLDNEFVLRLE |
| | GVIEKVNWDQDPKPALVTKFMENGSLSGLLQSQCPRPWPLLCRLLKEVVLGMFYLHDQNPVLLHRDLKPSNVLLDP |
| | ELHVKLADFGLSTFQGGSQSGTGSGEPGGTLGYLAPELFVNVNRKASTASDVYSFGILMWAVLAGREVELPTEPSLV |
| | YEAVCNRQNRPSLAELPQAGPETPGLEGLKELMQLCWSSEPKDRPSFQECLPKTDEVFQMVENNMNAAVSTVKDF |
| | LSQLRSSNRRFSIPESGQGGTEMDGFRRTIENQHSRNDVMVSEWLNKLNLEEPPSSVPKKCPSLTKRSRAQEEQVP |
| | QAWTAGTSSDSMAQPPQTPETSTFRNQMPSPTSTGTPSPGPRGNQGAERQGMNWSCRTPEPNPVTGRPLVNIY |
| | NCSGVQVGDNNYLTMQQTTALPTWGLAPSGKGRGLQHPPPVGSQEGPKDPEAWSRPQGWYNHSGKgvqvetisp |
| | gdgrtfpkrgqtcvvhytgmledgkkVdssrdrnkpfkfmlgkqevirgweegvaqmsvgqrakltispdyaygatghpgiipphatlvfdv |
| | ellklegvqvetispgdgrtfpkrgqtcvvhytgmledgkkVdssrdrnkpfkfmlgkqevirgweegvaqmsvgqrakltispdyaygatgh |
| | pgiipphatlvfdvellkle |
| | (huRIPK3-2xFv; TH1013 with no epitope tag) |
| 1339 | MSSVKLWPTGASAVPLVSREELKKLEFVGKGGFGVVFRAHHRTWNHDVAVKIVNSKKISWEVKAMVNLRNENVLL |
| | LLGVTEDLQWDFVSGQALVTRFMENGSLAGLLQPECPRPWPLLCRLLQEVVLGMCYLHSLNPPLLHRDLKPSNILLD |
| | PELHAKLADFGLSTFQGGSQSGSGSGSGSRDSGGTLAYLDPELLFDVNLKASKASDVYSFGILVWAVLAGREAELVD |
| | KTSLIRETVCDRQSRPPLTELPPGSPETPGLEKLKELMIHCWGSQSENRPSFQDCEPKTNEVYNLVKDKVDAAVSEVK |
| | HYLSQHRSSGRNLSAREPSQRGTEMDCPRETMVSKMLDRLHLEEPSGPVPGKCPERQAQDTSVGPATPARTSSDP |
| | VAGTPQIPHTLPFRGTTPGPVFTETPGPHPQRNQGDGRHGTPWYPWTPPNPMTGPPALVFNNCSEVQIGNYNSL |
| | VAPPRTTASSSAKYDQAQFGRGRGWQPFHKggikkeieaikkeqeaikkkieaiekeiea |
| | (muRIPK3-IZ.Trimer; TH1015 with no epitope tag) |
| 1340 | MSSVKLWPTGASAVPLVSREELKKLEFVGKGGFGVVFRAHHRTWNHDVAVKIVNSKKISWEVKAMVNLRNENVLL |
| | LLGVTEDLQWDFVSGQALVTRFMENGSLAGLLQPECPRPWPLLCRLLQEVVLGMCYLHSLNPPLLHRDLKPSNILLD |
| | PELHAKLADFGLSTFQGGSQSGSGSGSGSRDSGGTLAYLDPELLFDVNLKASKASDVYSFGILVWAVLAGREAELVD |
| | KTSLIRETVCDRQSRPPLTELPPGSPETPGLEKLKELMIHCWGSQSENRPSFQDCEPKTNEVYNLVKDKVDAAVSEVK |
| | HYLSQHRSSGRNLSAREPSQRGTEMDCPRETMVSKMLDRLHLEEPSGPVPGKCPERQAQDTSVGPATPARTSSDP |
| | VAGTPQIPHTLPFRGTTPGPVFTETPGPHPQRNQGDGRHGTPWYPWTPPNPMTGPPALVFNNCSEVQIGNYNSL |
| | VAPPRTTASSSAKYDQAQFGRGRGWQPFHKgggyipeaprdgqayvrkdgewvllstfl |
| | (muRIPK3-Foldon; TH1016 with no epitope tag) |
| 1341 | MSSVKLWPTGASAVPLVSREELKKLEFVGKGGFGVVFRAHHRTWNHDVAVKIVNSKKISWEVKAMVNLRNENVLL |
| | LLGVTEDLQWDFVSGQALVTRFMENGSLAGLLQPECPRPWPLLCRLLQEVVLGMCYLHSLNPPLLHRDLKPSNILLD |
| | PELHAKLADFGLSTFQGGSQSGSGSGSGSRDSGGTLAYLDPELLFDVNLKASKASDVYSFGILVWAVLAGREAELVD |
| | KTSLIRETVCDRQSRPPLTELPPGSPETPGLEKLKELMIHCWGSQSENRPSFQDCEPKTNEVYNLVKDKVDAAVSEVK |
| | HYLSQHRSSGRNLSAREPSQRGTEMDCPRETMVSKMLDRLHLEEPSGPVPGKCPERQAQDTSVGPATPARTSSDP |
| | VAGTPQIPHTLPFRGTTPGPVFTETPGPHPQRNQGDGRHGTPWYPWTPPNPMTGPPALVFNNCSEVQIGNYNSL |
| | VAPPRTTASSSAKYDQAQFGRGRGWQPFHKGSDGSGSGSGSITIRAAFLEKENTALRTEIAELEKEVGRCENIVSKYE |
| | TRYGPLGSDGSGSGSGSITIRAAFLEKENTALRTEIAELEKEVGRCENIVSKYETRYGPL |
| | (muRIPK3-2xEE; TH1017 with no epitope tag) |
| 1342 | MSSVKLWPTGASAVPLVSREELKKLEFVGKGGFGVVFRAHHRTWNHDVAVKIVNSKKISWEVKAMVNLRNENVLL |
| | LLGVTEDLQWDFVSGQALVTRFMENGSLAGLLQPECPRPWPLLCRLLQEVVLGMCYLHSLNPPLLHRDLKPSNILLD |
| | PELHAKLADFGLSTFQGGSQSGSGSGSGSRDSGGTLAYLDPELLFDVNLKASKASDVYSFGILVWAVLAGREAELVD |
| | KTSLIRETVCDRQSRPPLTELPPGSPETPGLEKLKELMIHCWGSQSENRPSFQDCEPKTNEVYNLVKDKVDAAVSEVK |
| | HYLSQHRSSGRNLSAREPSQRGTEMDCPRETMVSKMLDRLHLEEPSGPVPGKCPERQAQDTSVGPATPARTSSDP |
| | VAGTPQIPHTLPFRGTTPGPVFTETPGPHPQRNQGDGRHGTPWYPWTPPNPMTGPPALVFNNCSEVQIGNYNSL |
| | VAPPRTTASSSAKYDQAQFGRGRGWQPFHKGSDGSGSGSGSLEIRAAFLEKENTALRTRAAELRKRVGRCRNIVSKY |
| | ETRYGPLGSDGSGSGSGSLEIRAAFLEKENTALRTRAAELRKRVGRCRNIVSKYETRYGPL |
| | (muRIPK3-2xRR; TH1018 with no epitope tag) |
| 1343 | MSSVKLWPTGASAVPLVSREELKKLEFVGKGGFGVVFRAHHRTWNHDVAVKIVNSKKISWEVKAMVNLRNENVLL |
| | LLGVTEDLQWDFVSGQALVTRFMENGSLAGLLQPECPRPWPLLCRLLQEVVLGMCYLHSLNPPLLHRDLKPSNILLD |
| | PELHAKLADFGLSTFQGGSQSGSGSGSGSRDSGGTLAYLDPELLFDVNLKASKASDVYSFGILVWAVLAGREAELVD |
| | KTSLIRETVCDRQSRPPLTELPPGSPETPGLEKLKELMIHCWGSQSENRPSFQDCEPKTNEVYNLVKDKVDAAVSEVK |
| | HYLSQHRSSGRNLSAREPSQRGTEMDCPRETMVSKMLDRLHLEEPSGPVPGKCPERQAQDTSVGPATPARTSSDP |
| | VAGTPQIPHTLPFRGTTPGPVFTETPGPHPQRNQGDGRHGTPWYPWTPPNPMTGPPALVFNNCSEVQIGNYNSL |
| | VAPPRTTASSSAKYDQAQFGRGRGWQPFHKGSDGSGSGSGSITIRAAFLEKENTALRTEIAELEKEVGRCENIVSKYE |
| | TRYGPL |
| | (muRIPK3-EE; TH1019 with no epitope tag) |
| 1344 | MSSVKLWPTGASAVPLVSREELKKLEFVGKGGFGVVFRAHHRTWNHDVAVKIVNSKKISWEVKAMVNLRNENVLL |
| | LLGVTEDLQWDFVSGQALVTRFMENGSLAGLLQPECPRPWPLLCRLLQEVVLGMCYLHSLNPPLLHRDLKPSNILLD |
| | PELHAKLADFGLSTFQGGSQSGSGSGSGSRDSGGTLAYLDPELLFDVNLKASKASDVYSFGILVWAVLAGREAELVD |
| | KTSLIRETVCDRQSRPPLTELPPGSPETPGLEKLKELMIHCWGSQSENRPSFQDCEPKTNEVYNLVKDKVDAAVSEVK |
| | HYLSQHRSSGRNLSAREPSQRGTEMDCPRETMVSKMLDRLHLEEPSGPVPGKCPERQAQDTSVGPATPARTSSDP |
| | VAGTPQIPHTLPFRGTTPGPVFTETPGPHPQRNQGDGRHGTPWYPWTPPNPMTGPPALVFNNCSEVQIGNYNSL |
| | VAPPRTTASSSAKYDQAQFGRGRGWQPFHKGSDGSGSGSGSLEIRAAFLEKENTALRTRAAELRKRVGRCRNIVSKY |
| | ETRYGPL |
| | (muRIPK3-RR; TH1020 with no epitope tag) |
| 1345 | MGCVCSSNPEDDWMENGGIKKEIEAIKKEQEAIKKKIEAIEKEIEAGSGGGSGSGGGSDPFLVLLHSLSGSLSGNDLM |
| | ELKFLCRERVSKRKLERVQSGLDLFTVLLEQNDLERGHTGLLRELLASLRRHDLLQRLDDFEAGTATAAPPGEADLQV |
| | AFDIVCDNVGRDWKRLARELKVSEAKMDGIEEKYPRSLSERVRESLKVWKNAEKKNASVAGLVKALRTCRLNLVADL |
| | VEEAQESVSKSENMSPVLRDSTVSSSETP |
| | (Myr(Lck)-IZ-L-msFADD; TH3002 without epitope tag) |
| 1346 | MGCVCSSNPEDDWMENGGIKKEIEAIKKEQEAIKKKIEAIEKEIEAGSGGGSGSGGGSPGEEDLCAAFNVICDNVGK |
| | DWRRLARQLKVSDTKIDSIEDRYPRNLTERVRESLRIWKNTEKENATVAHLVGALRSCQMNLVADLVQEVQQARDL |
| | QNRSGAMSPMSWNS |
| | (Myr(Lck)-IZ-L-huFADD-DD; TH3003 without epitope tag) |
| 1347 | MGCVCSSNPEDDWMENGGIKKEIEAIKKEQEAIKKKIEAIEKEIEAGSGGGSGSGGGSPPGEADLQVAFDIVCDNVG |
| | RDWKRLARELKVSEAKMDGIEEKYPRSLSERVRESLKVWKNAEKKNASVAGLVKALRTCRLNLVADLVEEAQESVSK |
| | SENMSPVLRDSTVS |
| | (Myr(Lck)-IZ-L-msFADD-DD; TH3004 without epitope tag) |
| 1348 | MGQTVTTPLSLTLDHWGGIKKEIEAIKKEQEAIKKKIEAIEKEIEAGSGGGSGSGGGSDPFLVLLHSVSSSLSSSELTELK |
| | FLCLGRVGKRKLERVQSGLDLFSMLLEQNDLEPGHTELLRELLASLRRHDLLRRVDDFEAGAAAGAAPGEEDLCAAF |
| | NVICDNVGKDWRRLARQLKVSDTKIDSIEDRYPRNLTERVRESLRIWKNTEKENATVAHLVGALRSCQMNLVADLV |
| | QEVQQARDLQNRSGAMSPMSWNSDASTSEAS |
| | (Myr(MMSV)-IZ-L-huFADD; TH3005 without epitope tag) |
| 1349 | MGQTVTTPLSLTLDHWGGIKKEIEAIKKEQEAIKKKIEAIEKEIEAGSGGGSGSGGGSDPFLVLLHSLSGSLSGNDLMEL |
| | KFLCRERVSKRKLERVQSGLDLFTVLLEQNDLERGHTGLLRELLASLRRHDLLQRLDDFEAGTATAAPPGEADLQVAF |
| | DIVCDNVGRDWKRLARELKVSEAKMDGIEEKYPRSLSERVRESLKVWKNAEKKNASVAGLVKALRTCRLNLVADLVE |
| | EAQESVSKSENMSPVLRDSTVSSSETP |
| | (Myr(MMSV)-IZ-L-msFADD; TH3006 without epitope tag) |
| 1350 | MGQTVTTPLSLTLDHWGGIKKEIEAIKKEQEAIKKKIEAIEKEIEAGSGGGSGSGGGSPGEEDLCAAFNVICDNVGKD |
| | WRRLARQLKVSDTKIDSIEDRYPRNLTERVRESLRIWKNTEKENATVAHLVGALRSCQMNLVADLVQEVQQARDLQ |
| | NRSGAMSPMSWNS |
| | (Myr(MMSV)-IZ-L-huFADD-DD; TH3007 without epitope tag) |
| 1351 | MGQTVTTPLSLTLDHWGGIKKEIEAIKKEQEAIKKKIEAIEKEIEAGSGGGSGSGGGSPPGEADLQVAFDIVCDNVGR |
| | DWKRLARELKVSEAKMDGIEEKYPRSLSERVRESLKVWKNAEKKNASVAGLVKALRTCRLNLVADLVEEAQESVSKS |
| | ENMSPVLRDSTVS |
| | (Myr(MMSV)-IZ-L-msFADD-DD; TH3008 without epitope tag) |
| 1352 | MRMKQIEDKIEEILSKIYHIENEIARIKKLIGERAEGNHRKKPLKVLESLGKDFLTGVLDNLVEQNVLNWKEEEKKKYYD |
| | AKTEDKVRVMADSMQEKQRMAGQMLLQTFFNIDQISPNKKAHPNMEAGPPESGESTDALKLCPHEEFLRLCKERA |
| | EEIYPIKERNNRTRLALIICNTEFDHLPPRNGADFDITGMKELLEGLDYSVDVEENLTARDMESALRAFATRPEHKSSD |
| | STFLVLMSHGILEGICGTVHDEKKPDVLLYDTIFQIFNNRNCLSLKDKPKVIIVQACRGANRGELWVRDSPASLEVASS |
| | QSSENLEEDAVYKTHVEKDFIAFCSSTPHNVSWRDSTMGSIFITQLITCFQKYSWCCHLEEVFRKVQQSFETPRAKAQ |
| | MPTIERLSMTRYFYLFPGN |
| | (Caspase-4, full-length + IZ domain; P2006 without epitope tag) |
| 1353 | MRMKQIEDKIEEILSKIYHIENEIARIKKLIGERQISPNKKAHPNMEAGPPESGESTDALKLCPHEEFLRLCKERAEEIYPI |
| | KERNNRTRLALIICNTEFDHLPPRNGADFDITGMKELLEGLDYSVDVEENLTARDMESALRAFATRPEHKSSDSTFLVL |
| | MSHGILEGICGTVHDEKKPDVLLYDTIFQIFNNRNCLSLKDKPKVIIVQACRGANRGELWVRDSPASLEVASSQSSEN |
| | LEEDAVYKTHVEKDFIAFCSSTPHNVSWRDSTMGSIFITQLITCFQKYSWCCHLEEVFRKVQQSFETPRAKAQMPTIE |
| | RLSMTRYFYLFPGN |
| | (Caspase-4, N. del + IZ domain; P2009 without epitope tag) |
| 1354 | MRMKQLEDKIEELLSKIYHLENEIARLKKLIGERAEGNHRKKPLKVLESLGKDFLTGVLDNLVEQNVLNWKEEEKKKYY |
| | DAKTEDKVRVMADSMQEKQRMAGQMLLQTFFNIDQISPNKKAHPNMEAGPPESGESTDALKLCPHEEFLRLCKE |
| | RAEEIYPIKERNNRTRLALIICNTEFDHLPPRNGADFDITGMKELLEGLDYSVDVEENLTARDMESALRAFATRPEHKS |
| | SDSTFLVLMSHGILEGICGTVHDEKKPDVLLYDTIFQIFNNRNCLSLKDKPKVIIVQACRGANRGELWVRDSPASLEVA |
| | SSQSSENLEEDAVYKTHVEKDFIAFCSSTPHNVSWRDSTMGSIFITQLITCFQKYSWCCHLEEVFRKVQQSFETPRAK |
| | AQMPTIERLSMTRYFYLFPGN |
| | (Caspase-4, full-length + DM domain; P2012 without epitope tag) |
| 1355 | MRMKQLEDKIEELLSKIYHLENEIARLKKLIGERQISPNKKAHPNMEAGPPESGESTDALKLCPHEEFLRLCKERAEEIY |
| | PIKERNNRTRLALIICNTEFDHLPPRNGADFDITGMKELLEGLDYSVDVEENLTARDMESALRAFATRPEHKSSDSTFL |
| | VLMSHGILEGICGTVHDEKKPDVLLYDTIFQIFNNRNCLSLKDKPKVIIVQACRGANRGELWVRDSPASLEVASSQSSE |
| | NLEEDAVYKTHVEKDFIAFCSSTPHNVSWRDSTMGSIFITQLITCFQKYSWCCHLEEVFRKVQQSFETPRAKAQMPTI |
| | ERLSMTRYFYLFPGN |
| | (Caspase-4, N. del + DM domain; P2015 without epitope tag) |
| 1356 | MAEGNHRKKPLKVLESLGKDFLTGVLDNLVEQNVLNWKEEEKKKYYDAKTEDKVRVMADSMQEKQRMAGQMLL |
| | QTFFNIDQISPNKKAHPNMEAGPPESGESTDALKLCPHEEFLRLCKERAEEIYPIKERNNRTRLALIICNTEFDHLPPRN |
| | GADFDITGMKELLEGLDYSVDVEENLTARDMESALRAFATRPEHKSSDSTFLVLMSHGILEGICGTVHDEKKPDVLLY |
| | DTIFQIFNNRNCLSLKDKPKVIIVQACRGANRGELWVRDSPASLEVASSQSSENLEEDAVYKTHVEKDFIAFCSSTPHN |
| | VSWRDSTMGSIFITQLITCFQKYSWCCHLEEVFRKVQQSFETPRAKAQMPTIERLSMTRYFYLFPGN |
| | (Caspase-4, full-length wild-type; P2018 without epitope tag) |
| 1357 | MRMKQIEDKIEEILSKIYHIENEIARIKKLIGERAEDSGKKKRRKNFEAMFKGILQSGLDNFVINHMLKNNVAGQTSIQ |
| | TLVPNTDQKSTSVKKDNHKKKTVKMLEYLGKDVLHGVFNYLAKHDVLTLKEEEKKKYYDTKIEDKALILVDSLRKNRV |
| | AHQMFTQTLLNMDQKITSVKPLLQIEAGPPESAESTNILKLCPREEFLRLCKKNHDEIYPIKKREDRRRLALIICNTKFD |
| | HLPARNGAHYDIVGMKRLLQGLGYTVVDEKNLTARDMESVLRAFAARPEHKSSDSTFLVLMSHGILEGICGTAHKKK |
| | KPDVLLYDTIFQIFNNRNCLSLKDKPKVIIVQACRGEKHGELWVRDSPASLALISSQSSENLEADSVCKIHEEKDFIAFCS |
| | STPHNVSWRDRTRGSIFITELITCFQKYSCCCHLMEIFRKVQKSFEVPQAKAQMPTIERATLTRDFYLFPGN |
| | (Caspase-5, full-length + IZ domain; P2007 without epitope tag) |
| 1358 | MRMKQIEDKIEEILSKIYHIENEIARIKKLIGERDQKITSVKPLLQIEAGPPESAESTNILKLCPREEFLRLCKKNHDEIYPIK |
| | KREDRRRLALIICNTKFDHLPARNGAHYDIVGMKRLLQGLGYTVVDEKNLTARDMESVLRAFAARPEHKSSDSTFLVL |
| | MSHGILEGICGTAHKKKKPDVLLYDTIFQIFNNRNCLSLKDKPKVIIVQACRGEKHGELWVRDSPASLALISSQSSENLE |
| | ADSVCKIHEEKDFIAFCSSTPHNVSWRDRTRGSIFITELITCFQKYSCCCHLMEIFRKVQKSFEVPQAKAQMPTIERATL |
| | TRDFYLFPGN |
| | (Caspase-5, N. del + IZ domain; P2010 without epitope tag) |
| 1359 | MRMKQLEDKIEELLSKIYHLENEIARLKKLIGERAEDSGKKKRRKNFEAMFKGILQSGLDNFVINHMLKNNVAGQTSI |
| | QTLVPNTDQKSTSVKKDNHKKKTVKMLEYLGKDVLHGVFNYLAKHDVLTLKEEEKKKYYDTKIEDKALILVDSLRKNR |
| | VAHQMFTQTLLNMDQKITSVKPLLQIEAGPPESAESTNILKLCPREEFLRLCKKNHDEIYPIKKREDRRRLALIICNTKFD |
| | HLPARNGAHYDIVGMKRLLQGLGYTVVDEKNLTARDMESVLRAFAARPEHKSSDSTFLVLMSHGILEGICGTAHKKK |
| | KPDVLLYDTIFQIFNNRNCLSLKDKPKVIIVQACRGEKHGELWVRDSPASLALISSQSSENLEADSVCKIHEEKDFIAFCS |
| | STPHNVSWRDRTRGSIFITELITCFQKYSCCCHLMEIFRKVQKSFEVPQAKAQMPTIERATLTRDFYLFPGN |
| | (Caspase-5, full-length + DM domain; P2013 without epitope tag) |
| 1360 | MRMKQLEDKIEELLSKIYHLENEIARLKKLIGERDQKITSVKPLLQIEAGPPESAESTNILKLCPREEFLRLCKKNHDEIYPI |
| | KKREDRRRLALIICNTKFDHLPARNGAHYDIVGMKRLLQGLGYTVVDEKNLTARDMESVLRAFAARPEHKSSDSTFL |
| | VLMSHGILEGICGTAHKKKKPDVLLYDTIFQIFNNRNCLSLKDKPKVIIVQACRGEKHGELWVRDSPASLALISSQSSE |
| | NLEADSVCKIHEEKDFIAFCSSTPHNVSWRDRTRGSIFITELITCFQKYSCCCHLMEIFRKVQKSFEVPQAKAQMPTIER |
| | ATLTRDFYLFPGN |
| | (Caspase-5, N. del + DM domain; P2016 without epitope tag) |
| 1361 | MRMKQLEDKIEELLSKIYHLENEIARLKKLIGERDQKITSVKPLLQIEAGPPESAESTNILKLCPREEFLRLCKKNHDEIYPI |
| | KKREDRRRLALIICNTKFDHLPARNGAHYDIVGMKRLLQGLGYTVVDEKNLTARDMESVLRAFAARPEHKSSDSTFL |
| | VLMSHGILEGICGTAHKKKKPDVLLYDTIFQIFNNRNCLSLKDKPKVIIVQACRGEKHGELWVRDSPASLALISSQSSE |
| | NLEADSVCKIHEEKDFIAFCSSTPHNVSWRDRTRGSIFITELITCFQKYSCCCHLMEIFRKVQKSFEVPQAKAQMPTIER |
| | ATLTRDFYLFPGN |
| | (Caspase-5, full-length wild-type; P2019 without epitope tag) |
| 1362 | MRMKQIEDKIEEILSKIYHIENEIARIKKLIGERAENKHPDKPLKVLEQLGKEVLTEYLEKLVQSNVLKLKEEDKQKFNNA |
| | ERSDKRWVFVDAMKKKHSKVGEMLLQTFFSVDPGSHHGEANLEMEEPEESLNTLKLCSPEEFTRLCREKTQEIYPIKE |
| | ANGRTRKALIICNTEFKHLSLRYGANFDIIGMKGLLEDLGYDVVVKEELTAEGMESEMKDFAALSEHQTSDSTFLVLM |
| | SHGTLHGICGTMHSEKTPDVLQYDTIYQIFNNCHCPGLRDKPKVIIVQACRGGNSGEMWIRESSKPQLCRGVDLPR |
| | NMEADAVKLSHVEKDFIAFYSTTPHHLSYRDKTGGSYFITRLISCFRKHACSCHLFDIFLKVQQSFEKASIHSQMPTIDR |
| | ATLTRYFYLFPGN |
| | (Caspase-11, full-length + IZ domain; P2005 without epitope tag) |
| 1363 | MRMKQIEDKIEEILSKIYHIENEIARIKKLIGERPGSHHGEANLEMEEPEESLNTLKLCSPEEFTRLCREKTQEIYPIKEAN |
| | GRTRKALIICNTEFKHLSLRYGANFDIIGMKGLLEDLGYDVVVKEELTAEGMESEMKDFAALSEHQTSDSTFLVLMSH |
| | GTLHGICGTMHSEKTPDVLQYDTIYQIFNNCHCPGLRDKPKVIIVQACRGGNSGEMWIRESSKPQLCRGVDLPRNM |
| | EADAVKLSHVEKDFIAFYSTTPHHLSYRDKTGGSYFITRLISCFRKHACSCHLFDIFLKVQQSFEKASIHSQMPTIDRATL |
| | TRYFYLFPGN |
| | (Caspase-11, N. del + IZ domain; P2008 without epitope tag) |
| 1364 | MRMKQIEDKIEEILSKIYHIENEIARIKKLIGERPGSHHGEANLEMEEPEESLNTLKLCSPEEFTRLCREKTQEIYPIKEAN |
| | GRTRKALIICNTEFKHLSLRYGANFDIIGMKGLLEDLGYDVVVKEELTAEGMESEMKDFAALSEHQTSDSTFLVLMSH |
| | GTLHGICGTMHSEKTPDVLQYDTIYQIFNNCHCPGLRDKPKVIIVQACRGGNSGEMWIRESSKPQLCRGVDLPRNM |
| | EADAVKLSHVEKDFIAFYSTTPHHLSYRDKTGGSYFITRLISCFRKHACSCHLFDIFLKVQQSFEKASIHSQMPTIDRATL |
| | TRYFYLFPGN |
| | (Caspase-11, full-length + DM domain; P2011 without epitope tag) |
| 1365 | MRMKQLEDKIEELLSKIYHLENEIARLKKLIGERAENKHPDKPLKVLEQLGKEVLTEYLEKLVQSNVLKLKEEDKQKFNN |
| | AERSDKRWVFVDAMKKKHSKVGEMLLQTFFSVDPGSHHGEANLEMEEPEESLNTLKLCSPEEFTRLCREKTQEIYPI |
| | KEANGRTRKALIICNTEFKHLSLRYGANFDIIGMKGLLEDLGYDVVVKEELTAEGMESEMKDFAALSEHQTSDSTFLV |
| | LMSHGTLHGICGTMHSEKTPDVLQYDTIYQIFNNCHCPGLRDKPKVIIVQACRGGNSGEMWIRESSKPQLCRGVDL |
| | PRNMEADAVKLSHVEKDFIAFYSTTPHHLSYRDKTGGSYFITRLISCFRKHACSCHLFDIFLKVQQSFEKASIHSQMPTI |
| | DRATLTRYFYLFPGN |
| | (Caspase-11, N. del + DM domain; P2014 without epitope tag) |
| 1366 | MAENKHPDKPLKVLEQLGKEVLTEYLEKLVQSNVLKLKEEDKQKFNNAERSDKRWVFVDAMKKKHSKVGEMLLQT |
| | FFSVDPGSHHGEANLEMEEPEESLNTLKLCSPEEFTRLCREKTQEIYPIKEANGRTRKALIICNTEFKHLSLRYGANFDII |
| | GMKGLLEDLGYDVVVKEELTAEGMESEMKDFAALSEHQTSDSTFLVLMSHGTLHGICGTMHSEKTPDVLQYDTIYQ |
| | IFNNCHCPGLRDKPKVIIVQACRGGNSGEMWIRESSKPQLCRGVDLPRNMEADAVKLSHVEKDFIAFYSTTPHHLSY |
| | RDKTGGSYFITRLISCFRKHACSCHLFDIFLKVQQSFEKASIHSQMPTIDRATLTRYFYLFPGN |
| | (Caspase-11, full-length wild-type; P2017 without epitope tag) |
| 1367 | GSAFERVVRRVVQELDHGGEFIPVTSLQSSTGFQPYCLVVRKPSSSWFWKPRYKCVNLSIKDILEPDAAEPDVQRGR |
| | SFHFYDAMDGQIQGSVELAAPGQAKIAGGAAVSDSSSTSMNVYSLSVDPNTWQTLLHERHLRQPEHKVLQQLRSR |
| | GDNVYVVTEVLQTQKEVEVTRTHKREGSGRFSLPGATCLQGEGQGHLSQKKTVTIPSGSTLAFRVAQLVIDSDLDVL |
| | LFPDKKQRTFQPPATGHKRSTSEGAWPQLPSGLSMMRCLHNFLTDGVPAEGAFTEDFQGLRAEVETISKELELLDRE |
| | LCQLLLEGLEGVLRDQLALRALEEALEQGQSLGPVEPLDGPAGAVLECLVLSSGMLVPELAIPVVYLLGALTMLSETQ |
| | HKLLAEALESQTLLGPLELVGSLLEQSAPWQERSTMSLPPGLLGNSWGEGAPAWVLLDECGLELGEDTPHVCWEPQ |
| | AQGRMCALYASLALLSGLSQEPH |
| | (human GSDMD; SAW001 with no epitope tag) |
| 1368 | GSAFERVVRRVVQELDHGGEFIPVTSLQSSTGFQPYCLVVRKPSSSWFWKPRYKCVNLSIKDILEPDAAEPDVQRGR |
| | SFHFYDAMDGQIQGSVELAAPGQAKIAGGAAVSDSSSTSMNVYSLSVDPNTWQTLLHERHLRQPEHKVLQQLRSR |
| | GDNVYVVTEVLQTQKEVEVTRTHKREGSGRFSLPGATCLQGEGQGHLSQKKTVTIPSGSTLAFRVAQLVIDSDLDVL |
| | LFPDKKQRTFQPPATGHKRSTSEGAWPQLPSGLSMMRCLHNFLTD |
| | (human GSDMD(1-275); SAW002 with no epitope tag) |
| 1369 | GVPAEGAFTEDFQGLRAEVETISKELELLDRELCQLLLEGLEGVLRDQLALRALEEALEQGQSLGPVEPLDGPAGAVLE |
| | CLVLSSGMLVPELAIPVVYLLGALTMLSETQHKLLAEALESQTLLGPLELVGSLLEQSAPWQERSTMSLPPGLLGNSW |
| | GEGAPAWVLLDECGLELGEDTPHVCWEPQAQGRMCALYASLALLSGLSQEPH |
| | (human GSDMD(276-484); SAW003 with no epitope tag) |
| 1370 | PSAFEKVVKNVIKEVSGSRGDLIPVDSLRNSTSFRPYCLLNRKFSSSRFWKPRYSCVNLSIKDILEPSAPEPEPECFGSFK |
| | VSDVVDGNIQGRVMLSGMGEGKISGGAAVSDSSSASMNVCILRVTQKTWETMQHERHLQQPENKILQQLRSRGD |
| | DLFVVTEVLQTKEEVQITEVHSQEGSGQFTLPGALCLKGEGKGHQSRKKMVTIPAGSILAFRVAQLLIGSKWDILLVS |
| | DEKQRTFEPSSGDRKAVGQRHHGLNVLAALCSIGKQLSLLSDGIDEEELIEAADFQGLYAEVKACSSELESLEMELRQ |
| | QILVNIGKILQDQPSMEALEASLGQGLCSGGQVEPLDGPAGCILECLVLDSGELVPELAAPIFYLLGALAVLSETQQQL |
| | LAKALETTVLSKQLELVKHVLEQSTPWQEQSSVSLPTVLLGDCWDEKNPTWVLLEECGLRLQVESPQVHWEPTSLIP |
| | TSALYASLFLLSSLGQKPC |
| | (mouse GSDMD; SAW004 with no epitope tag) |
| 1371 | PSAFEKVVKNVIKEVSGSRGDLIPVDSLRNSTSFRPYCLLNRKFSSSRFWKPRYSCVNLSIKDILEPSAPEPEPECFGSFK |
| | VSDVVDGNIQGRVMLSGMGEGKISGGAAVSDSSSASMNVCILRVTQKTWETMQHERHLQQPENKILQQLRSRGD |
| | DLFVVTEVLQTKEEVQITEVHSQEGSGQFTLPGALCLKGEGKGHQSRKKMVTIPAGSILAFRVAQLLIGSKWDILLVS |
| | DEKQRTFEPSSGDRKAVGQRHHGLNVLAALCSIGKQLSLLSD |
| | (mouse GSDMD(1-276); SAW005 with no epitope tag) |
| 1372 | GIDEEELIEAADFQGLYAEVKACSSELESLEMELRQQILVNIGKILQDQPSMEALEASLGQGLCSGGQVEPLDGPAGCI |
| | LECLVLDSGELVPELAAPIFYLLGALAVLSETQQQLLAKALETTVLSKQLELVKHVLEQSTPWQEQSSVSLPTVLLGDC |
| | WDEKNPTWVLLEECGLRLQVESPQVHWEPTSLIPTSALYASLFLLSSLGQKPC |
| | (mouse GSDMD(277-487); SAW006 with no epitope tag) |
| 1373 | MKMASTRCKLARYLEDLEDVDLKKFKMHLEDYPPQKGCIPLPRGQTEKADHVDLATLMIDFNGEEKAWAMAVWI |
| | FAAINRRDLYEKAKRDEPKWGSDNARVSNPTVICQEDSIEEEWMGLLEYLSRISICKMKKDYRKKYRKYVRSRFQCIE |
| | DRNARLGESVSLNKRYTRLRLIKEHRSQQEREQELLAIGKTKTCESPVSPIKMELLFDPDDEHSEPVHTVVFQGAAGIG |
| | KTILARKMMLDWASGTLYQDRFDYLFYIHCREVSLVTQRSLGDLIMSCCPDPNPPIHKIVRKPSRILFLMDGFDELQG |
| | AFDEHIGPLCTDWQKAERGDILLSSLIRKKLLPEASLLITTRPVALEKLQHLLDHPRHVEILGFSEAKRKEYFFKYFSDEA |
| | QARAAFSLIQENEVLFTMCFIPLVCWIVCTGLKQQMESGKSLAQTSKTTTAVYVFFLSSLLQPRGGSQEHGLCAHLW |
| | GLCSLAADGIWNQKILFEESDLRNHGLQKADVSAFLRMNLFQKEVDCEKFYSFIHMTFQEFFAAMYYLLGGGSGGG |
| | SGGIKKEIEAIKKEQEAIKKKIEAIEKEIEA |
| | (hu.caNLRP3(PYD_NACHT_IZ); P3005 without epitope tag) |
| 1374 | MTSVRCKLAQYLEDLEDVDLKKFKMHLEDYPPEKGCIPVPRGQMEKADHLDLATLMIDFNGEEKAWAMAVWIFA |
| | AINRRDLWEKAKKDQPEWNDTCTSHSSMVCQEDSLEEEWMGLLGYLSRISICKKKKDYCKMYRRHVRSRFYSIKDR |
| | NARLGESVDLNSRYTQLQLVKEHPSKQEREHELLTIGRTKMRDSPMSSLKLELLFEPEDGHSEPVHTVVFQGAAGIGK |
| | TILARKIMLDWALGKLFKDKFDYLFFIHCREVSLRTPRSLADLIVSCWPDPNPPVCKILRKPSRILFLMDGFDELQGAFD |
| | EHIGEVCTDWQKAVRGDILLSSLIRKKLLPKASLLITTRPVALEKLQHLLDHPRHVEILGFSEAKRKEYFFKYFSNELQAR |
| | EAFRLIQENEVLFTMCFIPLVCWIVCTGLKQQMETGKSLAQTSKTTTAVYVFFLSSLLQSRGGIEEHLFSDYLQGLCSL |
| | AADGIWNQKILFEECDLRKHGLQKTDVSAFLRMNVFQKEVDCERFYSFSHMTFQEFFAAMYYLLGGGSGGGSGGI |
| | KKEIEAIKKEQEAIKKKIEAIEKEIEA |
| | (mu.caNLRP3(PYD_NACHT_IZ); P3007 without epitope tag) |
| 1375 | MAKTLGDHLLNTLEELLPYDFEKFKFKLQNTSLEKGHSKIPRGHMQMARPVKLASLLITYYGEEYAVRLTLQILRATNQ |
| | RQLAEELRKATGTEHLIEENRVGGSVQSSVENKAKSVKVPDVPEGDGTQQNNDESDTLPSSQAEVGKGPQKKSLTK |
| | RKDQRGPESLDSQTKPWTRSTAPLYRRTQGTQSPGDKESTASAQLRRNVSSAGRLQGLYNNAPGRRESKKAEVYVY |
| | LPSGKKRPRSLEITTYSREGEPPNSEVLPTQEETRNGSLIRMRTATLNGRTTGALEKGTGIPEHSMVLDEKTFRNMSSK |
| | TSLIGEERCPTSWTENGNGSPETTESSGETAGSILSDPEVPLSLCEKPAKTPEDPASLGQAACEGRSQDKAVCPLCHT |
| | QEGDLRGDTCVQSSCSCSIAPGDPKASGRCSICFQCQGLLARKSCEAQSPQSLPQCPRHMKQVLLLFCEDHREPICLI |
| | CRLSLEHQGHRVRPIEEAALEYKEQIREQLERLREMRGYVEEHRLQGDKKTDDFLKQTEIQKQKISCPLEKLYQLLEKQ |
| | EQLFVTWLQELSQTISKVRETYYTRVSLLDEMIEELEAKQDQPEWDLMQDIGITLHRAKMMSASELLDTPPGVKEKL |
| | HLLYQKSKSVEKNMQCFSEMLSSEMAFSASDVAKWEGRQPSATQVQGLVPTVHLKCDGAHTQDCDVVFYPEREA |
| | GGSEPKDYLHPQPAQDTPELHEIHSRNNKRKFKSFLKWKPSFSRTDWRLRTCCYRDLDQAAAHPNLIFSMI |
| | (muPYRIN-B30.2(V726A); P3002 without epitope tag) |
| 1376 | MAKTLGDHLLNTLEELLPYDFEKFKFKLQNTSLEKGHSKIPRGHMQMARPVKLASLLITYYGEEYAVRLTLQILRATNQ |
| | RQLAEELRKATGTEHLIEENRVGGSVQSSVENKAKSVKVPDVPEGDGTQQNNDESDTLPSSQAEVGKGPQKKSLTK |
| | RKDQRGPESLDSQTKPWTRSTAPLYRRTQGTQSPGDKESTASAQLRRNVSSAGRLQGLYNNAPGRRESKKAEVYVY |
| | LPSGKKRPRSLEITTYSREGEPPNSEVLPTQEETRNGSLIRMRTATLNGRTTGALEKGTGIPEHSMVLDEKTFRNMSSK |
| | TSLIGEERCPTSWTENGNGSPETTESSGETAGSILSDPEVPLSLCEKPAKTPEDPASLGQAACEGRSQDKAVCPLCHT |
| | QEGDLRGDTCVQSSCSCSIAPGDPKASGRCSICFQCQGLLARKSCEAQSPQSLPQCPRHMKQVLLLFCEDHREPICLI |
| | CRLSLEHQGHRVRPIEEAALEYKEQIREQLERLREMRGYVEEHRLQGDKKTDDFLKQTEIQKQKISCPLEKLYQLLEKQ |
| | EQLFVTWLQELSQTISKVRETYYTRVSLLDEMIEELEAKQDQPEWDLMQDIGITLHRAKMMSASELLDTPPGVKEKL |
| | HLLYQKSKSVEKNMQCFSEMLSSEMAFSASDVAKWEGRQPSATQVQGLVPTVHLKCDGAHTQDCDVVFYPEREA |
| | GGSEPKDYLHPQPAQDTPELHEIHSRNNKRKFKSFLKWKPSFSRTDWRLRTCCYRDLDQAAAHPNLIFSMISEMEM |
| | FNVPELIGAQAHAVNVILDAETAYPNLIFSDDLKSVRLGNKWERLPDGPQRFDSCIIVLGSPSFLSGRRYWEVEVGDK |
| | TAWILGACKTSISRKGNMTLSPENGYWVVIMMKENEYQASSVPPTRLLIKEPPKRVGIFVDYRVGSISFYNVTARSHI |
| | YTFASCSFSGPLQPIFSPGTRDGGKNTAPLTICPVGGQGPD |
| | (muPYRIN-B30.2; P3004 without epitope tag) |
| 1377 | MGGIKKEIEAIKKEQEAIKKKIEAIEKEIEAGSGAAPAGIQAPPQSAAKPGLHFIDQHRAALIARVTNVEWLLDALYGK |
| | VLTDEQYQAVRAEPTNPSKMRKLFSFTPAWNWTCKDLLLQALRESQSYLVEDLERS |
| | (hu.caASC(IZ_CARD); P3006 without epitope tag) |
| 1378 | MGGIKKEIEAIKKEQEAIKKKIEAIEKEIEAGSGAVAAAASVPAQSTARTGHFVDQHRQALIARVTEVDGVLDALHGS |
| | VLTEGQYQAVRAETTSQDKMRKLFSFVPSWNLTCKDSLLQALKEIHPYLVMDLEQS |
| | (mu.caASC(IZ_CARD); P3008 without epitope tag) |
| 1379 | MSCVKLWPSGAPAPLVSIEELENQELVGKGGFGTVFRAQHRKWGYDVAVKIVNSKAISREVKAMASLDNEFVLRLE |
| | GVIEKVNWDQDPKPALVTKFMENGSLSGLLQSQCPRPWPLLCRLLKEVVLGMFYLHDQNPVLLHRDLKPSNVLLDP |
| | ELHVKLADFGLSTFQGGSQSGTGSGEPGGTLGYLAPELFVNVNRKASTASDVYSFGILMWAVLAGREVELPTEPSLV |
| | YEAVCNRQNRPSLAELPQAGPETPGLEGLKELMQLCWSSEPKDRPSFQECLPKTDEVFQMVENNMNAAVSTVKDF |
| | LSQLRSSNRRFSIPESGQGGTEMDGFRRTIENQHSRNDVMVSEWLNKLNLEEPPSSVPKKCPSLTKRSRAQEEQVP |
| | QAWTAGTSSDSMAQPPQTPETSTFRNQMPSPTSTGTPSPGPRGNQGAERQGMNWSCRTPEPNPVTGRPLVNIY |
| | NCSGVQVGDNNYLTMQQTTALPTWGLAPSGKGRGLQHPPPVGSQEGPKDPEAWSRPQGWYNHSGK |
| | (huRIPK3; TH1014 with no epitope tag) |
| 1380 | GGGAAATAAGAGAGAAAAGAAGAGTAAGAAGAAATATAAGAGCCACC |
| | (5′UTR) |
| 1381 | CCGCCGCCGCCG |
| | (GC-Rich RNA Element) |
| 1382 | CCGCCGCCGCCGCCG |
| | (GC Rich RNA Element) |
| 1383 | CCCCGGCGCC |
| | (GC Rich RNA Element) |
| 1384 | GGGAAATAAGAGAGAAAAGAAGAGTAAGAAGAAATATAAGA |
| | (5′UTR) |
| 1385 | GGGAAATAAGAGAGAAAAGAAGAGTAAGAAGAAATATAAGACCCCGGCGCCGCCACC |
| | (5′UTR - V1) |
| 1386 | GGGAAATAAGAGAGAAAAGAAGAGTAAGAAGAAATATAAGACCCCGGCGCCACC |
| | (5′UTR-V2) |
| 1387 | MEHDLERGPPGPRRPPRGPPLSSSLGLALLLLLLALLFWLYIVMSDWTGGALLVLYSFALMLIIIILIIFIFRRDLLCPLGAL |
| | CILLLMITLLLIALWNLHGQALFLGIVLFIFGCLLVLGIWIYLLEMLWRLGATIWQLLAFFLAFFLDLILLIIALYLQQNWW |
| | TLLVDLLWLLLFLAILIWMYYHGQRPFAEDKTYKYICRNFSNFCNVDVVEILPYLPCLTARDQDRLRATCTLSGNRDTL |
| | WHLFNTLQRRPGWVEYFIAALRGCELVDLADEVASVYQSYQPRTSDRPPDPLEPPSLPAERPGPPTPAAAHSIPYNS |
| | CREKEPSYPMPVQETQAPESPGENSEQALQTLSPRAIPRNPDGGPLESSSDLAALSPLTSSGHQEQDTELGSTHTAG |
| | ATSSLTPSRGPVSPSVSFQPLARSTPRASRLPGPTGSVVSTGTSFSSSSPGLASAGAAEGKQGAESDQAEPIICSSGAE |
| | APANSLPSKVPTTLMPVNTVALKVPANPASVSTVPSKLPTSSKPPGAVPSNALTNPAPSKLPINSTRAGMVPSKVPTS |
| | MVLTKVSASTVPTDGSSRNEETPAAPTPAGATGGSSAWLDSSSENRGLGSELSKPGVLASQVDSPFSGCFEDLAISAS |
| | TSLGMGPCHGPEENEYKSEGTFGIHVAENPSIQLLEGNPGPPADPDGGPRPQADRKFQEREVPCHRPSPGALWLQ |
| | VAVTGVLVVTLLVVLYRRRLH |
| | (Human MAVS) |
| 1388 | ATIGTAMYK (EBV BRLF1) |
| 1389 | SIIPSGPLK (FLU) |
| 1390 | AVDLSHFLK (HIV NEF) |
| 1391 | AVFDRKSDAK (EBV) |
| 1392 | YVNVNMGLK (HBV CORE ANUIGEN) |
| 1393 | RVCEKMALY (HCV) |
| 1394 | KLGGALQAK (CMV) |
| 1395 | ATGAGAATGAAGCAGCTGGAGGACAAGATCGAGGAGCTGCTGAGCAAGATCTACCACCTGGAGAACGAGATC |
| | GCCAGACTGAAGAAGCTGATCGGCGAGGCCGACCAGACCAGCGGCAACTACCTGAACATGCAGGACAGCCAG |
| | GGCGTGCTGAGCAGCTTCCCCGCCCCCCAGGCCGTGCAGGACAACCCCGCCATGCCCACCAGCAGCGGCAGCG |
| | AGGGCAACGTGAAGCTGTGCAGCCTGGAGGAGGCCCAGAGAATCTGGAAGCAGAAGAGCGCCGAGATCTAC |
| | CCCATCATGGACAAGAGCAGCAGAACCAGACTGGCCCTGATCATCTGCAACGAGGAGTTCGACAGCATCCCCA |
| | GAAGAACCGGCGCCGAGGTGGACATCACCGGCATGACCATGCTGCTGCAGAACCTGGGCTACAGCGTGGACG |
| | TGAAGAAGAACCTGACCGCCAGCGACATGACCACCGAGCTGGAGGCCTTCGCCCACAGACCCGAGCACAAGA |
| | CCAGCGACAGCACCTTCCTGGTGTTCATGAGCCACGGCATCAGAGAGGGCATCTGCGGCAAGAAGCACAGCG |
| | AGCAGGTGCCCGACATCCTGCAGCTGAACGCCATCTTCAACATGCTGAACACCAAGAACTGCCCCAGCCTGAA |
| | GGACAAGCCCAAGGTGATCATCATCCAGGCCTGCAGAGGCGACAGCCCCGGCGTGGTGTGGTTCAAGGACAG |
| | CGTGGGCGTGAGCGGCAACCTGAGCCTGCCCACCACCGAGGAGTTCGAGGACGACGCCATCAAGAAGGCCCA |
| | CATCGAGAAGGACTTCATCGCCTTCTGCAGCAGCACCCCCGACAACGTGAGCTGGAGACACCCCACCATGGGC |
| | AGCGTGTTCATCGGCAGACTGATCGAGCACATGCAGGAGTACGCCTGCAGCTGCGACGTGGAGGAGATCTTCA |
| | GAAAGGTGAGATTCAGCTTCGAGCAGCCCGACGGCAGAGCCCAGATGCCCACCACCGAGAGAGTGACCCTGA |
| | CCAGATGCTTCTACCTGTTC:CCCGGCCAC |
| | DM_hsCASP1 (self-activating human Caspase 1); P2025 without eptope tag) |
| 1396 | ATGAGAATGAAGCAGCTGGAGGACAAGATCGAGGAGCTGCTGAGCAAGATCTATCACCTGGAGAACGAGATC |
| | GCCAGACTGAAGAAGCTGATCGGCGAGAGACAGATCAGCCCCAACAAGAAGGCCCACCCCAACATGGAGGCC |
| | GGACCGCCTGAGAGCGGCGAGAGCACCGACGCCCTGAAGCTGTGCCCCCACGAGGAGTTCCTGAGACTGTGC |
| | AAGGAGAGAGCCGAGGAGATCTACCCCATCAAGGAGAGAAACAACAGAACCAGACTGGCCCTGATCATCTGC |
| | AACACCGAGTTCGACCACCTGCCCCCCAGAAACGGCGCCGACTTCGACATCACCGGCATGAAGGAGCTGCTGG |
| | AGGGCCTGGACTACAGCGTGGACGTGGAGGAGAACCTGACCGCCAGAGACATGGAGAGCGCCCTGAGAGCC |
| | TTCGCCACCAGACCCGAGCACAAGAGCAGCGACAGCACCTTCCTGGTGCTGATGAGCCACGGCATCCTGGAGG |
| | GCATCTGCGGCACCGTGCACGACGAGAAGAAGCCCGACGTGCTGCTGTACGACACCATCTTCCAGATCTTCAAC |
| | AACAGAAACTGCCTGAGCCTGAAGGACAAGCCCAAGGTGATCATCGTGCAGGCCTGCAGAGGCGCCAACAGA |
| | GGCGAGCTGTGGGTGAGAGACAGCCCCGCCAGCCTGGAGGTGGCCAGCAGCCAGAGCAGCGAGAACCTGGA |
| | GGAGGACGCCGTGTACAAGACCCACGTGGAGAAGGACTTCATCGCCTTCTGCAGCAGCACCCCCCACAACGTG |
| | AGCTGGAGAGACAGCACCATGGGCAGCATCTTCATCACCCAGCTGATAACCTGCTTCCAGAAGTACAGCTGGT |
| | GCTGCCACCTGGAGGAGGTCTTCAGAAAGGTGCAGCAGAGCTTCGAGACCCCCAGAGCCAAGGCCCAGATGC |
| | CCACCATCGAGAGACTGAGCATGACCAGATACTTCTACCTGTTCCCCGGCAAC |
| | (Caspase-4, N. del + DM domain; P2015 without epitope tag) |
| 1397 | ATGTCGTGGTCCCCCTCACTTACTACTCAAACTTGCGGCGCCTGGGAAATGAAGGAAAGACTCGGTACCGGGG |
| | GATTTGGAAACGTGATCCGGTGGCACAACCAAGAAACCGGAGAGCAAATTGCGATCAAGCAGTGTAGACAGG |
| | AACTGAGCCCTCGGAACAGAGAGCGGTGGTGCCTGGAGATTCAGATTATGCGCCGGCTGACCCATCCGAACGT |
| | GGTGGCTGCCAGGGATGTCCCGGAGGGCATGCAGAACCTGGCCCCTAACGACCTCCCACTCCTGGCCATGGAA |
| | TACTGCCAGGGTGGCGATCTGCGGAAGTACCTTAACCAATTCGAAAACTGCTGTGGACTCAGGGAAGGGGCCA |
| | TTCTGACTCTCTTGTCGGACATCGCCAGCGCCCTGAGATACCTCCACGAGAACAGAATCATCCATCGCGATCTG |
| | AAGCCGGAGAACATTGTGCTGCAACAGGGCGAACAGCGGCTGATCCACAAAATCATTGATCTCGGATATGCCA |
| | AGGAACTGGACCAGGGCGAACTCTGCACCGAATTCGTGGGCACTCTCCAGTACCTGGCACCCGAGTTGCTGGA |
| | GCAGCAGAAGTACACCGTCACCGTCGACTACTGGTCCTTCGGAACCCTCGCATTCGAATGTATCACTGGCTTCC |
| | GCCCTTTCCTGCCTAACTGGCAGCCTGTGCAGTGGCATTCGAAGGTCCGGCAGAAATCGGAGGTGGACATCGT |
| | GGTGTCCGAGGATCTGAACGGCACAGTGAAGTTCTCCTCCTCACTGCCTTACCCCAACAACCTCAACTCCGTGCT |
| | GGCCGAACGGCTGGAAAAGTGGCTCCAGCTTATGCTGATGTGGCATCCACGCCAGCGGGGTACTGATCCGACC |
| | TACGGTCCGAACGGGTGCTTCAAGGCCCTGGACGACATACTGAACCTCAAGCTCGTGCACATCCTCAATATGGT |
| | GACCGGCACGATCCATACTTACCCCGTCACCGAGGACGAATCGTTGCAGTCACTGAAGGCTCGGATCCAGCAG |
| | GACACCGGGATTCCCGAAGAGGACCAGGAACTTCTGCAGGAAGCGGGACTGGCGTTGATCCCCGACAAGCCT |
| | GCCACCCAGTGCATCTCTGACGGGAAGCTGAATGAAGGTCACACCCTGGATATGGACCTTGTGTTCCTGTTCGA |
| | CAATTCCAAGATCACCTACGAGACTCAGATTAGCCCTAGGCCTCAGCCGGAATCCGTGTCGTGCATCCTGCAAG |
| | AACCGAAGCGGAATCTGGCGTTCTTTCAACTGCGGAAAGTGTGGGGCCAAGTCTGGCACAGCATTCAGACACT |
| | GAAGGAGGATTGCAACCGGCTGCAGCAAGGACAGCGCGCCGCTATGATGAATCTGCTGCGCAACAATTCCTGC |
| | CTCTCAAAAATGAAGAACTCCATGGCCTCGATGTCCCAGCAATTGAAGGCCAAGCTGGATTTCTTCAAGACCTC |
| | GATCCAGATCGACCTGGAAAAGTACAGCGAGCAGACCGAGTTCGGAATCACCTCCGACAAGCTGCTGTTGGCA |
| | TGGCGGGAGATGGAACAAGCGGTGGAGCTGTGCGGACGCGAAAACGAGGTCAAACTGTTGGTGGAAAGAAT |
| | GATGGCCCTGCAGACCGACATCGTGGACCTCCAGCGATCCCCTATGGGCCGGAAGCAGGGTGGCACCCTCGAT |
| | GACCTGGAAGAACAGGCTCGGGAGCTGTACAGGCGCCTGCGGGAAAAGCCGCGGGACCAGAGAACTGAAGG |
| | GGATTCCCAGGAGATGGTGCGCCTGCTGCTTCAAGCCATCCAGTCATTCGAAAAGAAGGTCCGCGTGATCTAC |
| | ACCCAACTGAGCAAGACTGTGGTGTGCAAGCAGAAGGCCCTCGAACTGCTGCCGAAGGTGGAGGAGGTCGTG |
| | TCCCTGATGAACGAGGACGAAAAGACGGTCGTGAGACTCCAGGAAAAGAGACAGAAGGAACTGTGGAACCTT |
| | CTCAAGATTGCCTGCTCCAAAGTGCGCGGACCTGTGGCTGGAGCTCCCGACGCCATGAACGCCGCTAGACTCG |
| | CGCAGCCTGGACAGCTCATGGCCCAGCCCGCAACTGCAGCTAACGCCCTGCCCGAACCAGCGAAGAAGGCGG |
| | AGGAGCTTGTGGCGGAAGCCCACAACCTGTGCACCCTGCTCGAAAACGCCATCCAGGACACTGTGCGGGAACA |
| | AGACCAATCCTTCACCGCCCTGGATTGGTCATGGCTGCAGACTGAGGAAGAGGAGCACTCCTGTCTGGAGCAA |
| | GCCTCG |
| | Human constitutively active IKK beta (PEST mutation) P.4015 without epitope tag |
| 1398 | ATGAGCGCCGAGGTGATCCACCAGGTGGAGGAGGCCCTGGACACCGACGAGAAGGAGATGCTGCTGTTCCTG |
| | TGCAGAGACGTGGCCATCGACGTGGTGCCCCCCAACGTGAGAGACCTGCTGGACATCCTGAGAGAGAGAGGC |
| | AAGCTGAGCGTGGGCGACCTGGCCGAGCTGCTGTACAGAGTGAGAAGATTCGACCTGCTGAAGAGAATCCTG |
| | AAGATGGACAGAAAGGCCGTGGAGACCCACCTGCTGAGAAACCCCCACCTGGTGAGCGACTACAGAGTGCTG |
| | ATGGCCGAGATCGGCGAGGACCTGGACAAGAGCGACGTGAGCAGCCTGATCTTCCTGATGAAGGACTACATG |
| | GGCAGAGGCAAGATCAGCAAGGAGAAGAGCTTCCTGGACCTGGTGGTGGAGCTGGAGAAGCTGAACCTGGT |
| | GGCCCCCGACCAGCTGGACCTGCTGGAGAAGTGCCTGAAGAACATCCACAGAATCGACCTGAAGACCAAGATC |
| | CAGAAGTACAAGCAGAGCGTGCAGGGCGCCGGCACCAGCTACAGAAACGTGCTGCAGGCCGCCATCCAGAAG |
| | AGCCTGAAGGACCCCAGCAACAACTTCAGACTGCACAACGGCAGAAGCAAGGAGCAGAGACTGAAGGAGCAG |
| | CTGGGCGCCCAGCAGGAGCCCGTGAAGAAGAGCATCCAGGAGAGCGAGGCCTTCCTGCCCCAGAGCATCCCC |
| | GAGGAGAGATACAAGATGAAGAGCAAGCCCCTGGGCATCTGCCTGATCATCGACTGCATCGGCAACGAGACC |
| | GAGCTGCTGAGAGACACCTTCACCAGCCTGGGCTACGAGGTGCAGAAGTTCCTGCACCTGAGCATGCACGGCA |
| | TCAGCCAGATCCTGGGCCAGTTCGCCTGCATGCCCGAGCACAGAGACTACGACAGCTTCGTGTGCGTGCTGGT |
| | GAGCAGAGGCGGCAGCCAGAGCGTGTACGGCGTGGACCAGACCCACAGCGGCCTGCCCCTGCACCACATCAG |
| | AAGAATGTTCATGGGCGACAGCTGCCCCTACCTGGCCGGCAAGCCCAAGATGTTCTTCATCCAGAACTACGTGG |
| | TGAGCGAGGGCCAGCTGGAGGACAGCAGCCTGCTGGAGGTGGACGGCCCCGCCATGAAGAACGTGGAGTTC |
| | AAGGCCCAGAAGAGAGGCCTGTGCACCGTGCACAGAGAGGCCGACTTCTTCTGGAGCCTGTGCACCGCCGAC |
| | ATGAGCCTGCTGGAGCAGAGCCACAGCAGCCCCAGCCTGTACCTGCAGTGCCTGAGCCAGAAGCTGAGACAG |
| | GAGAGAAAGAGACCCCTGCTGGACCTGCACATCGAGCTGAACGGCTACATGTACGACTGGAACAGCAGAGTG |
| | AGCGCCAAGGAGAAGTACTACGTGTGGCTGCAGCACACCCTGAGAAAGAAGCTGATCCTGAGCTACACC |
| | (hu-cFLIP-L; P1006 without epitope tag) |
| 1399 | ATGAGCGCCGAGGTGATCCACCAGGTGGAGGAGGCCCTGGACACCGACGAGAAGGAGATGCTGCTGTTCCTG |
| | TGCAGAGACGTGGCCATCGACGTGGTGCCCCCCAACGTGAGAGACCTGCTGGACATCCTGAGAGAGAGAGGC |
| | AAGCTGAGCGTGGGCGACCTGGCCGAGCTGCTGTACAGAGTGAGAAGATTCGACCTGCTGAAGAGAATCCTG |
| | AAGATGGACAGAAAGGCCGTGGAGACCCACCTGCTGAGAAACCCCCACCTGGTGAGCGACTACAGAGTGCTG |
| | ATGGCCGAGATCGGCGAGGACCTGGACAAGAGCGACGTGAGCAGCCTGATCTTCCTGATGAAGGACTACATG |
| | GGCAGAGGCAAGATCAGCAAGGAGAAGAGCTTCCTGGACCTGGTGGTGGAGCTGGAGAAGCTGAACCTGGT |
| | GGCCCCCGACCAGCTGGACCTGCTGGAGAAGTGCCTGAAGAACATCCACAGAATCGACCTGAAGACCAAGATC |
| | CAGAAGTACAAGCAGAGCGTGCAGGGCGCCGGCACCAGCTACAGAAACGTGCTGCAGGCCGCCATCCAGAAG |
| | AGCCTGAAGGACCCCAGCAACAACTTCAGACTGCACAACGGCAGAAGCAAGGAGCAGAGACTGAAGGAGCAG |
| | CTGGGCGCCCAGCAGGAGCCCGTGAAGAAGAGC |
| | (hu-cFLIP-S(1-227); P1007 without epitope tag) |
| 1400 | ATGAGCGCCGAGGTGATCCACCAGGTGGAGGAGGCCCTGGACACCGACGAGAAGGAGATGCTGCTGTTCCTG |
| | TGCAGAGACGTGGCCATCGACGTGGTGCCCCCCAACGTGAGAGACCTGCTGGACATCCTGAGAGAGAGAGGC |
| | AAGCTGAGCGTGGGCGACCTGGCCGAGCTGCTGTACAGAGTGAGAAGATTCGACCTGCTGAAGAGAATCCTG |
| | AAGATGGACAGAAAGGCCGTGGAGACCCACCTGCTGAGAAACCCCCACCTGGTGAGCGACTACAGAGTGCTG |
| | ATGGCCGAGATCGGCGAGGACCTGGACAAGAGCGACGTGAGCAGCCTGATCTTCCTGATGAAGGACTACATG |
| | GGCAGAGGCAAGATCAGCAAGGAGAAGAGCTTCCTGGACCTGGTGGTGGAGCTGGAGAAGCTGAACCTGGT |
| | GGCCCCCGACCAGCTGGACCTGCTGGAGAAGTGCCTGAAGAACATCCACAGAATCGACCTGAAGACCAAGATC |
| | CAGAAGTACAAGCAGAGCGTGCAGGGCGCCGGCACCAGCTACAGAAACGTGCTGCAGGCCGCCATCCAGAAG |
| | AGCCTGAAGGAC |
| | (hu-cFLIP-p22(1-198); P1008 without epitope tag) - nucleotide |
| 1401 | ATGAGCGCCGAGGTGATCCACCAGGTGGAGGAGGCCCTGGACACCGACGAGAAGGAGATGCTGCTGTTCCTG |
| | TGCAGAGACGTGGCCATCGACGTGGTGCCCCCCAACGTGAGAGACCTGCTGGACATCCTGAGAGAGAGAGGC |
| | AAGCTGAGCGTGGGCGACCTGGCCGAGCTGCTGTACAGAGTGAGAAGATTCGACCTGCTGAAGAGAATCCTG |
| | AAGATGGACAGAAAGGCCGTGGAGACCCACCTGCTGAGAAACCCCCACCTGGTGAGCGACTACAGAGTGCTG |
| | ATGGCCGAGATCGGCGAGGACCTGGACAAGAGCGACGTGAGCAGCCTGATCTTCCTGATGAAGGACTACATG |
| | GGCAGAGGCAAGATCAGCAAGGAGAAGAGCTTCCTGGACCTGGTGGTGGAGCTGGAGAAGCTGAACCTGGT |
| | GGCCCCCGACCAGCTGGACCTGCTGGAGAAGTGCCTGAAGAACATCCACAGAATCGACCTGAAGACCAAGATC |
| | CAGAAGTACAAGCAGAGCGTGCAGGGCGCCGGCACCAGCTACAGAAACGTGCTGCAGGCCGCCATCCAGAAG |
| | AGCCTGAAGGACCCCAGCAACAACTTCAGACTGCACAACGGCAGAAGCAAGGAGCAGAGACTGAAGGAGCAG |
| | CTGGGCGCCCAGCAGGAGCCCGTGAAGAAGAGCATCCAGGAGAGCGAGGCCTTCCTGCCCCAGAGCATCCCC |
| | GAGGAGAGATACAAGATGAAGAGCAAGCCCCTGGGCATCTGCCTGATCATCGACTGCATCGGCAACGAGACC |
| | GAGCTGCTGAGAGACACCTTCACCAGCCTGGGCTACGAGGTGCAGAAGTTCCTGCACCTGAGCATGCACGGCA |
| | TCAGCCAGATCCTGGGCCAGTTCGCCTGCATGCCCGAGCACAGAGACTACGACAGCTTCGTGTGCGTGCTGGT |
| | GAGCAGAGGCGGCAGCCAGAGCGTGTACGGCGTGGACCAGACCCACAGCGGCCTGCCCCTGCACCACATCAG |
| | AAGAATGTTCATGGGCGACAGCTGCCCCTACCTGGCCGGCAAGCCCAAGATGTTCTTCATCCAGAACTACGTGG |
| | TGAGCGAGGGCCAGCTGGAGGACAGCAGCCTGCTGGAGGTGGAC |
| | (hu-cFLIP-p43(1-376); P1009 without epitope tag) - nucleotide |
| 1402 | ATGGGCCCCGCCATGAAGAACGTGGAGTTCAAGGCCCAGAAGAGAGGCCTGTGCACCGTGCACAGAGAGGCC |
| | GACTTCTTCTGGAGCCTGTGCACCGCCGACATGAGCCTGCTGGAGCAGAGCCACAGCAGCCCCAGCCTGTACC |
| | TGCAGTGCCTGAGCCAGAAGCTGAGACAGGAGAGAAAGAGACCCCTGCTGGACCTGCACATCGAGCTGAACG |
| | GCTACATGTACGACTGGAACAGCAGAGTGAGCGCCAAGGAGAAGTACTACGTGTGGCTGCAGCACACCCTGA |
| | GAAAGAAGCTGATCCTGAGCTACACC |
| | (hu-cFLIP-p12(377-480); P1010 without epitope tag) - nucleotide |
| 1403 | ATGCAGCCCGACATGAGCCTGAACGTGATCAAGATGAAGAGCAGCGACTTCCTGGAATCGGCCGAGCTGGAC |
| | AGCGGCGGCTTCGGCAAGGTGAGCCTGTGCTTCCACAGAACTCAGGGCCTGATGATCATGAAGACCGTGTACA |
| | AGGGCCCCAATTGCATCGAGCACAACGAGGCCTTACTGGAGGAGGCCAAGATGATGAACAGACTGAGACATT |
| | CGAGAGTGGTCAAGTTACTGGGCGTGATCATCGAGGAAGGCAAGTACAGCCTGGTGATGGAGTACATGGAAA |
| | AGGGCAACCTGATGCACGTGCTGAAGGCCGAGATGAGCACCCCCCTGAGCGTGAAGGGCAGAATCATCCTGG |
| | AGATTATCGAGGGGATGTGCTACCTGCACGGCAAGGGCGTGATCCACAAGGACCTGAAGCCGGAGAACATCC |
| | TGGTGGACAACGACTTCCACATCAAGATCGCCGACCTGGGCCTGGCCAGCTTTAAGATGTGGAGCAAGCTGAA |
| | CAACGAGGAGCACAACGAGTTAAGAGAGGTGGACGGCACCGCCAAGAAGAACGGCGGCACCTTATACTACAT |
| | GGCCCCCGAGCACCTGAACGATGTGAACGCCAAGCCCACCGAGAAGAGCGACGTGTACTCCTTTGCCGTGGTC |
| | CTGTGGGCCATCTTCGCCAACAAGGAGCCCTACGAGAACGCCATTTGCGAGCAGCAGCTGATCATGTGCATTA |
| | AGAGCGGCAACAGACCCGACGTGGACGACATCACCGAGTACTGCCCCAGAGAGATTATCAGCCTGATGAAGCT |
| | GTGCTGGGAGGCCAACCCCGAGGCTAGACCCACCTTCCCTGGGATCGAGGAGAAATTCAGACCCTTCTACCTG |
| | AGCCAGCTGGAGGAGAGCGTGGAAGAGGACGTGAAGAGCCTGAAGAAAGAGTACAGCAACGAGAACGCTGT |
| | GGTGAAGCGCATGCAGAGCCTGCAGCTGGACTGCGTGGCCGTCCCCAGCAGCAGAAGCAACAGTGCCACCGA |
| | GCAGCCGGGCTCGCTGCACTCCAGCCAGGGCCTGGGCATGGGCCCCGTGGAGGAGAGCTGGTTCGCCCCCTC |
| | GCTGGAGCACCCCCAGGAGGAGAACGAACCTAGCCTGCAGAGCAAGCTGCAGGACGAGGCCAACTACCACCT |
| | GTACGGCAGCAGAATGGACAGACAGACCAAGCAGCAACCAAGACAGAACGTGGCCTACAACAGAGAGGAGG |
| | AACGAAGAAGAAGAGTGAGCCACGACCCCTTCGCCCAGCAGAGACCCTACGAGAACTTCCAGAACACCGAGG |
| | GCAAGGGCACCGCCTATAGCAGCGCCGCCAGCCACGGCAACGCAGTGCACCAGCCCAGCGGCCTGACCTCTCA |
| | GCCCCAGGTGCTGTACCAGAATAATGGCCTGTATAGCAGCCACGGCTTCGGCACCAGACCCCTGGACCCAGGC |
| | ACCGCCGGCCCTAGAGTGTGGTACAGACCCATCCCAAGCCACATGCCCAGCCTGCACAACATACCGGTGCCCG |
| | AGACAAACTACTTGGGCAACACCCCCACCATGCCCTTCAGCAGCCTGCCCCCCACAGACGAGAGCATCAAGTAC |
| | ACCATCTATAACAGCACCGGCATCCAGATCGGCGCCTACAACTATATGGAGATCGGCGGTACCAGCAGCAGCG |
| | GCGGCATCAAGAAGGAGATAGAGGCAATCAAGAAGGAGCAGGAGGCCATCAAGAAGAAGATCGAAGCCATC |
| | GAGAAGGAGATTGAGGCC |
| | (huRIPK1(1-555).IZ.TM; TH1021 without epitope tag) - nucleotide |
| 1404 | ATGCAGCCCGACATGAGCCTGAATGTGATCAAGATGAAGAGCAGCGACTTCCTGGAGAGCGCCGAGCTGGAT |
| | AGCGGCGGATTCGGCAAGGTGAGCCTGTGCTTCCACAGAACCCAAGGCCTGATGATCATGAAGACCGTGTACA |
| | AGGGACCCAACTGCATCGAGCACAACGAAGCCCTGTTAGAGGAAGCCAAGATGATGAATAGACTGCGTCACTC |
| | TAGGGTGGTTAAACTGCTGGGCGTGATCATCGAGGAGGGCAAGTACAGCCTGGTGATGGAGTACATGGAGAA |
| | GGGCAACCTTATGCACGTGCTGAAGGCCGAGATGTCCACCCCCCTGAGCGTGAAGGGCAGAATCATCCTGGAG |
| | ATCATCGAGGGAATGTGTTATCTGCATGGCAAGGGCGTGATCCACAAAGACCTGAAGCCCGAGAACATCCTGG |
| | TGGACAACGATTTCCACATCAAGATCGCCGACCTGGGCCTGGCCAGCTTCAAGATGTGGAGCAAGCTGAACAA |
| | CGAGGAGCACAACGAACTGAGAGAGGTGGATGGCACCGCCAAGAAAAACGGCGGCACCCTGTATTACATGGC |
| | CCCCGAGCACCTGAACGACGTGAACGCCAAGCCCACCGAGAAGAGCGACGTTTACAGCTTTGCCGTGGTGCTG |
| | TGGGCCATCTTCGCCAACAAGGAGCCCTACGAGAACGCCATCTGCGAGCAGCAGCTGATCATGTGCATCAAGA |
| | GCGGCAACAGACCCGACGTGGACGACATCACCGAGTACTGCCCCCGTGAGATCATTAGCCTGATGAAGCTGTG |
| | CTGGGAGGCCAACCCCGAGGCCAGACCCACCTTCCCCGGCATTGAGGAGAAGTTCAGACCCTTCTACCTGAGC |
| | CAGTTAGAGGAAAGCGTGGAGGAGGACGTGAAAAGCCTGAAGAAAGAGTACTCTAACGAGAACGCCGTGGT |
| | GAAACGCATGCAGAGCCTGCAGCTGGATTGCGTGGCCGTGCCCAGCTCCAGAAGCAACAGCGCCACCGAACA |
| | ACCTGGCAGCCTGCACAGCTCCCAGGGCCTGGGCATGGGCCCCGTGGAGGAGAGCTGGTTCGCCCCCTCCCTG |
| | GAGCATCCGCAGGAGGAGAACGAGCCCTCTCTGCAGTCCAAGCTGCAAGACGAGGCCAACTACCACCTGTACG |
| | GCAGCAGAATGGACAGACAGACCAAGCAGCAACCCAGACAAAATGTGGCCTACAATAGAGAGGAGGAGAGA |
| | AGAAGAAGAGTGAGCCACGACCCTTTCGCCCAGCAGAGACCCTACGAGAACTTCCAGAATACCGAGGGCAAG |
| | GGTACCGCCTACAGCTCAGCGGCCTCGCACGGCAACGCCGTGCACCAGCCCAGCGGCCTGACCAGCCAGCCCC |
| | AGGTGCTGTACCAAAACAACGGCCTGTATAGCTCCCACGGCTTTGGCACCAGACCCCTGGACCCCGGCACCGCC |
| | GGCCCCAGAGTCTGGTATAGACCCATCCCCAGCCATATGCCTAGCCTGCACAACATCCCCGTGCCCGAGACCAA |
| | CTACCTGGGCAATACCCCCACCATGCCGTTCAGCAGCTTACCCCCCACCGACGAGAGCATCAAGTACACCATCT |
| | ACAACAGCACCGGCATCCAGATCGGCGCCTACAACTACATGGAAATCGGCGGAACCAGCAGCAGCGGCAGCG |
| | ACGGCAGCGGCTCCGGAAGCGGAAGCATAACCATCAGGGCCGCCTTCCTGGAGAAGGAAAATACCGCGCTGA |
| | GAACAGAGATTGCCGAGTTAGAAAAGGAGGTGGGCAGATGCGAGAACATAGTGAGCAAGTACGAGACCAGA |
| | TACGGCCCCCTG |
| | (huRIPK1(1-555).EE.DM; TH1022 without epitope tag) - nucleotide |
| 1405 | ATGCAACCCGACATGAGCTTGAACGTGATCAAGATGAAGAGCAGCGATTTCCTGGAGAGCGCCGAGCTGGAC |
| | AGCGGCGGCTTCGGCAAGGTGAGCCTGTGTTTCCACAGAACCCAGGGCCTGATGATCATGAAGACAGTGTACA |
| | AGGGCCCCAACTGCATCGAGCACAACGAGGCCCTGCTGGAGGAGGCTAAGATGATGAACAGACTGAGACACA |
| | GCAGAGTCGTGAAGCTGCTGGGCGTGATCATCGAAGAGGGCAAGTACAGCCTGGTGATGGAGTACATGGAGA |
| | AAGGCAACCTTATGCACGTGCTCAAGGCCGAGATGAGCACCCCTCTGAGCGTGAAGGGAAGAATCATCCTGGA |
| | GATCATCGAGGGCATGTGCTACCTGCACGGCAAGGGCGTCATCCATAAGGACCTGAAGCCCGAGAATATCCTT |
| | GTGGACAACGACTTCCATATCAAGATCGCCGACCTCGGCCTGGCCAGCTTCAAGATGTGGAGCAAGCTGAACA |
| | ACGAGGAGCACAACGAGCTGAGAGAGGTAGACGGCACCGCCAAGAAAAATGGCGGCACCCTGTACTACATGG |
| | CTCCCGAGCACCTGAATGACGTGAACGCCAAGCCTACCGAAAAGAGCGACGTGTATAGCTTCGCCGTGGTGCT |
| | CTGGGCCATCTTCGCCAACAAGGAGCCTTATGAGAATGCAATCTGCGAGCAGCAGCTGATCATGTGCATCAAG |
| | AGCGGCAACAGACCCGACGTGGACGACATCACCGAATACTGCCCCAGAGAGATCATCAGCCTGATGAAGCTGT |
| | GCTGGGAGGCCAACCCCGAGGCCAGACCCACCTTCCCCGGCATTGAGGAGAAGTTCAGACCCTTCTACCTGAG |
| | CCAGTTGGAAGAGAGCGTGGAGGAGGACGTCAAAAGCCTGAAGAAGGAGTACAGCAACGAGAACGCCGTCG |
| | TGAAGAGAATGCAGAGCCTGCAGCTGGACTGCGTGGCCGTGCCTAGCAGCAGAAGCAACAGCGCCACCGAGC |
| | AGCCCGGCAGCCTGCACAGCAGCCAGGGCCTTGGAATGGGCCCCGTGGAGGAAAGCTGGTTCGCCCCCAGCC |
| | TTGAGCATCCGCAGGAGGAGAACGAGCCCAGCCTGCAGAGCAAGCTGCAGGACGAAGCCAACTATCACCTGT |
| | ACGGCAGCAGAATGGACCGACAGACCAAGCAGCAGCCCAGACAGAACGTGGCCTATAACCGAGAGGAGGAG |
| | AGAAGAAGAAGGGTGAGCCACGACCCCTTCGCCCAACAGAGACCCTACGAGAACTTCCAGAACACCGAGGGC |
| | AAGGGCACCGCTTACAGTAGCGCCGCAAGCCACGGCAACGCCGTGCACCAACCTAGCGGACTGACCAGCCAG |
| | CCCCAGGTGCTGTACCAAAACAACGGTCTGTACAGCTCACACGGCTTCGGGACCAGACCCTTAGATCCCGGAAC |
| | CGCCGGCCCCAGAGTATGGTATAGACCCATCCCCAGCCACATGCCCAGCTTGCACAACATCCCCGTGCCCGAGA |
| | CCAACTACCTGGGCAACACCCCCACCATGCCCTTCAGCAGCCTGCCCCCCACCGACGAGAGCATCAAATATACC |
| | ATCTACAACAGCACCGGAATCCAGATCGGGGCCTACAATTACATGGAGATCGGAGGCACCAGCAGCAGCGGC |
| | AGCGACGGTAGCGGAAGCGGCAGCGGCAGCCTCGAGATCAGAGCCGCCTTCCTGGAGAAGGAGAACACCGC |
| | CCTGAGAACCAGAGCCGCCGAACTGAGAAAGAGAGTGGGCAGATGCAGAAACATCGTGAGCAAGTACGAGA |
| | CCAGATACGGCCCCCTG |
| | (huRIPK1(1-555).RR.DM; TH1023 without epitope tag) - nucleotide |
| 1406 | ATGCAGCCTGACATGAGCCTGGACAATATCAAGATGGCCAGCAGCGACCTGCTCGAGAAGACCGACCTGGACA |
| | GTGGCGGCTTCGGAAAAGTGAGCCTGTGCTACCACAGGTCTCACGGGTTCGTGATCCTGAAGAAGGTGTACAC |
| | CGGCCCCAACAGAGCCGAGTATAATGAGGTGCTGCTGGAGGAGGGCAAGATGATGCACAGACTGAGACATAG |
| | CAGAGTGGTGAAGCTGCTGGGCATCATCATCGAGGAGGGAAACTACAGCCTGGTTATGGAGTACATGGAGAA |
| | GGGCAACCTAATGCACGTGTTGAAGACCCAGATAGACGTGCCACTGAGCTTAAAGGGCAGAATCATCGTGGA |
| | GGCTATCGAGGGCATGTGCTACCTGCACGACAAGGGCGTGATCCACAAAGACCTGAAGCCCGAGAACATACTC |
| | GTGGATAGAGATTTCCACATCAAGATCGCCGACCTGGGCGTGGCCAGCTTCAAGACTTGGAGCAAGCTGACAA |
| | AGGAGAAGGACAACAAGCAGAAGGAGGTGAGCAGCACCACCAAGAAAAACAACGGCGGCACCCTGTACTAC |
| | ATGGCCCCTGAGCACCTGAACGACATCAACGCCAAGCCCACCGAGAAGAGCGACGTGTATAGCTTCGGCATCG |
| | TGCTGTGGGCCATCTTTGCTAAGAAAGAGCCCTACGAGAACGTGATCTGCACCGAGCAGTTCGTCATCTGCATC |
| | AAGAGCGGCAACAGACCCAATGTGGAGGAGATCCTGGAATACTGCCCCAGAGAGATCATCAGCCTCATGGAG |
| | AGATGCTGGCAGGCCATCCCTGAGGACAGACCCACCTTCCTGGGCATTGAGGAGGAGTTCAGACCCTTCTACC |
| | TGAGCCACTTCGAGGAGTACGTGGAGGAGGACGTGGCCAGTCTGAAAAAGGAGTATCCAGACCAGAGCCCCG |
| | TGCTGCAGAGAATGTTCAGCCTGCAGCACGACTGTGTGCCCCTGCCCCCCAGCAGAAGCAACAGCGAGCAGCC |
| | GGGCAGCCTGCACAGCAGCCAGGGCTTACAAATGGGACCCGTGGAGGAGAGCTGGTTCAGCAGTAGCCCCGA |
| | GTACCCCCAGGACGAGAACGACAGGTCGGTCCAGGCCAAGCTCCAGGAAGAGGCCAGCTACCACGCCTTCGG |
| | CATCTTCGCCGAGAAGCAAACCAAGCCCCAGCCCAGACAAAACGAAGCCTACAACAGAGAGGAAGAGAGAAA |
| | GAGACGCGTAAGCCACGACCCCTTTGCCCAACAGAGAGCCAGAGAAAACATCAAGAGCGCCGGCGCCCGGGG |
| | CCACTCGGATCCGAGCACCACTAGCAGAGGCATCGCTGTGCAGCAACTCAGCTGGCCCGCCACCCAGACCGTG |
| | TGGAACAACGGCCTGTACAACCAGCACGGCTTCGGCACCACCGGCACCGGCGTTTGGTACCCCCCCAACCTGTC |
| | GCAGATGTACAGCACCTACAAAACCCCCGTGCCCGAGACCAACATCCCCGGCAGCACCCCCACCATGCCCTATT |
| | TCAGCGGCCCCGTGGCCGACGACCTGATCAAGTACACCATCTTCAACAGCAGCGGCATCCAGATCGGCAACCA |
| | CAATTACATGGACGTGGGCCTGAACAGCCAGCCACCCAACAACACCTGCAAGGAAGAAAGCACCAGCGGCGG |
| | CATCAAGAAGGAAATCGAGGCCATCAAGAAGGAGCAGGAAGCCATAAAGAAGAAAATCGAGGCCATCGAGA |
| | AGGAGATCGAGGCC |
| | (msRIPK1(1-555).IZ.TM; TH1024 without epitope tag) - nucleotide |
| 1407 | ATGCAGCCCGACATGAGCCTGGACAACATTAAGATGGCCAGTAGCGACCTGCTGGAGAAGACCGACCTGGAT |
| | AGCGGGGGCTTCGGCAAGGTGAGCCTGTGCTACCACAGAAGCCACGGATTCGTGATCCTGAAGAAGGTGTAC |
| | ACCGGCCCCAACAGAGCCGAGTACAACGAGGTGCTGCTGGAGGAGGGCAAGATGATGCATAGACTGAGACAC |
| | AGCAGAGTGGTGAAACTGCTGGGGATCATCATCGAAGAGGGCAACTATAGCCTGGTGATGGAATACATGGAG |
| | AAGGGCAACCTGATGCACGTGCTGAAGACCCAGATCGACGTGCCCCTGAGCCTGAAGGGCAGAATCATCGTG |
| | GAGGCCATCGAGGGTATGTGCTACCTGCACGATAAGGGCGTGATCCACAAGGACCTGAAACCTGAAAACATCT |
| | TAGTGGACAGAGACTTCCACATCAAGATCGCCGACCTGGGAGTGGCTAGCTTCAAGACCTGGAGCAAACTGAC |
| | CAAGGAGAAGGATAACAAGCAGAAGGAAGTGAGCAGCACCACCAAGAAAAACAACGGAGGCACCCTGTACT |
| | ACATGGCCCCCGAGCATCTGAACGACATCAACGCCAAGCCCACCGAGAAGAGCGACGTGTACTCCTTCGGCAT |
| | CGTCTTATGGGCCATCTTCGCCAAGAAGGAGCCCTACGAGAACGTGATCTGCACCGAACAGTTTGTGATCTGCA |
| | TCAAGAGCGGCAATAGACCCAACGTGGAGGAGATCCTGGAGTACTGCCCCAGAGAGATCATCAGCCTGATGG |
| | AGAGGTGCTGGCAGGCTATCCCCGAGGACAGACCCACCTTTCTGGGCATCGAGGAAGAGTTCAGACCCTTCTA |
| | TCTGAGCCACTTCGAGGAGTATGTTGAGGAGGACGTGGCCAGCCTGAAGAAGGAGTACCCCGACCAGAGCCC |
| | CGTGCTGCAGAGAATGTTCAGCCTGCAACACGATTGCGTGCCGCTGCCCCCCAGCAGATCGAATAGCGAGCAG |
| | CCAGGCAGCCTACACAGCAGTCAGGGCCTGCAGATGGGCCCCGTGGAGGAAAGCTGGTTCAGCAGCAGCCCC |
| | GAGTACCCCCAGGACGAGAATGACAGAAGCGTGCAAGCAAAGCTGCAAGAGGAGGCCAGCTACCACGCCTTC |
| | GGCATCTTCGCCGAGAAACAGACTAAGCCCCAGCCCAGACAGAACGAGGCCTACAACAGAGAGGAGGAGAGA |
| | AAAAGACGAGTGAGCCACGACCCCTTCGCCCAGCAGAGAGCCAGAGAGAATATCAAGAGCGCCGGCGCCAGA |
| | GGCCACAGCGACCCCAGCACCACCAGCAGAGGAATCGCCGTGCAGCAGCTGAGCTGGCCCGCCACCCAGACC |
| | GTGTGGAACAACGGCCTGTACAACCAGCACGGCTTTGGCACCACCGGCACCGGCGTGTGGTATCCCCCCAACC |
| | TGAGCCAGATGTACAGCACCTATAAAACCCCTGTGCCGGAGACCAATATCCCCGGCAGCACCCCTACCATGCCC |
| | TACTTCAGCGGCCCCGTGGCCGACGACCTGATCAAGTACACGATCTTCAACAGCAGCGGCATCCAGATAGGCA |
| | ACCACAACTACATGGACGTGGGCCTGAACAGCCAACCCCCCAATAACACCTGCAAGGAGGAGTCCACCAGCGG |
| | CAGCGACGGCAGCGGCAGCGGCAGCGGCAGCATAACCATCAGAGCTGCTTTCCTGGAGAAGGAGAACACCGC |
| | TCTGAGAACCGAGATCGCCGAGCTGGAGAAGGAGGTCGGCAGATGCGAGAATATCGTGAGCAAGTACGAGA |
| | CCAGATACGGACCCCTG |
| | (msRIPK1(1-555).EE.DM; TH1025 without epitope tag) - nucleotide |
| 1408 | ATGCAGCCTGATATGAGCCTGGACAACATCAAGATGGCCAGCAGCGACTTGCTGGAGAAGACCGATCTGGACT |
| | CCGGCGGCTTTGGCAAGGTGAGCCTGTGTTACCACAGAAGCCACGGCTTCGTGATCCTGAAAAAGGTGTACAC |
| | CGGCCCCAATAGAGCAGAGTACAACGAGGTGCTGCTGGAGGAGGGCAAGATGATGCACAGACTGAGGCATA |
| | GCAGAGTGGTGAAACTGCTGGGCATCATCATTGAGGAGGGCAACTACAGCCTGGTGATGGAGTACATGGAGA |
| | AGGGCAACCTGATGCATGTGCTGAAGACCCAAATCGACGTGCCCCTGTCGCTGAAGGGCAGAATCATCGTGGA |
| | GGCCATCGAGGGGATGTGCTACCTGCACGACAAGGGCGTGATCCACAAGGACCTGAAGCCCGAGAACATCCT |
| | GGTGGATAGAGACTTCCACATCAAGATCGCCGACCTGGGCGTTGCCAGCTTCAAGACCTGGTCTAAACTGACC |
| | AAGGAGAAAGACAACAAGCAGAAGGAGGTGAGCAGCACCACCAAGAAGAACAACGGCGGAACACTGTACTA |
| | TATGGCCCCTGAGCACCTGAACGACATCAACGCCAAGCCCACCGAGAAAAGCGATGTTTACAGCTTCGGCATC |
| | GTGCTGTGGGCCATCTTCGCCAAGAAGGAGCCCTACGAGAACGTGATCTGCACCGAGCAGTTCGTGATCTGCA |
| | TCAAGAGCGGCAACAGACCCAACGTGGAGGAAATCCTGGAGTACTGCCCCAGAGAGATCATCAGCCTGATGG |
| | AGAGATGCTGGCAGGCCATCCCCGAGGACCGTCCCACGTTCCTGGGCATCGAAGAGGAGTTCCGGCCCTTCTA |
| | CCTGAGCCATTTCGAGGAGTATGTGGAGGAGGACGTGGCCAGCCTGAAGAAGGAGTACCCCGACCAGAGCCC |
| | AGTGCTGCAGAGAATGTTCAGCCTTCAACACGACTGCGTGCCCCTGCCTCCCTCAAGAAGCAACAGCGAGCAG |
| | CCCGGCAGCTTGCACAGCAGCCAGGGCCTGCAGATGGGCCCCGTGGAGGAGAGCTGGTTTAGCAGCAGCCCC |
| | GAGTACCCCCAGGACGAGAATGACAGAAGCGTGCAAGCCAAGTTACAGGAGGAGGCCAGCTACCACGCCTTT |
| | GGAATCTTCGCCGAGAAGCAGACCAAGCCCCAGCCCAGACAGAACGAGGCCTACAACAGAGAGGAGGAGAG |
| | AAAAAGAAGAGTGAGCCACGACCCCTTCGCCCAGCAGAGAGCCAGAGAGAACATTAAGAGCGCCGGCGCGAG |
| | AGGCCACAGCGACCCCAGCACCACAAGCAGAGGCATCGCCGTGCAGCAATTGAGCTGGCCCGCCACCCAGACC |
| | GTGTGGAACAACGGCCTGTATAACCAGCACGGCTTCGGAACCACCGGCACCGGCGTGTGGTACCCCCCCAATC |
| | TGAGCCAGATGTACAGCACTTACAAGACCCCCGTGCCCGAAACCAACATCCCCGGCAGCACCCCCACCATGCCC |
| | TACTTCAGCGGCCCCGTGGCCGACGACCTCATCAAGTACACAATATTTAACAGCAGCGGCATCCAGATCGGCAA |
| | CCACAACTACATGGACGTGGGCCTGAACAGCCAGCCCCCGAACAATACCTGCAAGGAGGAGAGCACAAGCGG |
| | CTCTGACGGCAGCGGCAGCGGCAGCGGCTCACTGGAGATCAGAGCTGCCTTCCTGGAAAAGGAGAACACCGC |
| | TCTGAGAACCAGAGCCGCCGAGCTGCGAAAGAGAGTAGGCAGATGCAGAAACATCGTGAGCAAGTACGAGAC |
| | CAGATACGGTCCCCTG |
| | (msRIPK1(1-555).RR.DM; TH1026 without epitope tag) - nucleotide |
| 1409 | ATGAGCGCCGGCGACCCCAGAGTGGGCAGCGGCAGCCTGGACAGCTTCATGTTCAGCATCCCCCTGGTGGCCC |
| | TGAACGTGGGCGTGAGAAGAAGACTGAGCCTGTTCCTGAACCCCAGAACCCCCGTGGCCGCCGACTGGACCCT |
| | GCTGGCCGAGGAGATGGGCTTCGAGTACCTGGAGATCAGAGAGCTGGAGACCAGACCCGACCCCACCAGAAG |
| | CCTGCTGGACGCCTGGCAGGGCAGAAGCGGCGCCAGCGTGGGCAGACTGCTGGAGCTGCTGGCCCTGCTGGA |
| | CAGAGAGGACATCCTGAAGGAGCTGAAGAGCAGAATCGAGGAGGACTGCCAGAAGTACCTGGGCAAGCAGC |
| | AGAACCAGGAGAGCGAGAAGCCCCTGCAGGTGGCCAGAGTGGAGAGCAGCGTGCCCCAGACCAAGGAGCTG |
| | GGCGGCATCACCACCCTGGACGACCCCCTGGGCCAGACCCCCGAGCTGTTCGACGCCTTCATCTGCTACTGCCC |
| | CAACGACATCGAGTTCGTGCAGGAGATGATCAGACAGCTGGAGCAGACCGACTACAGACTGAAGCTGTGCGT |
| | GAGCGACAGAGACGTGCTGCCCGGCACCTGCGTGTGGAGCATCGCCAGCGAGCTGATCGAGAAGAGATGCAG |
| | AAGAATGGTGGTGGTGGTGAGCGACGACTACCTGCAGAGCAAGGAGTGCGACTTCCAGACCAAGTTCGCCCT |
| | GAGCCTGAGCCCCGGCGTGCAGCAGAAGAGACCCATCCCCATCAAGTACAAGGCCATGAAGAAGGACTTCCCC |
| | AGCATCCTGAGATTCATCACCATCTGCGACTACACCAACCCCTGCACCAAGAGCTGGTTCTGGACCAGACTGGC |
| | CAAGGCCCTGAGCCTGCCC |
| | (human myd88(L265P); P4027 without epitope tag) - nucleotide |
| 1410 | ATGGGCGTGGGCAAGAGCAAGCTGGACAAGTGCCCCCTGAGCTGGCACAAGAAGGACAGCGTGGACGCCGA |
| | CCAGGACGGCCACGAGAGCGACAGCAAGAACAGCGAGGAGGCCTGCCTGAGAGGCTTCGTGGAGCAGAGCA |
| | GCGGCAGCGAGCCCCCCACCGGCGAGCAGGACCAGCCCGAGGCCAAGGGCGCCGGCCCCGAGGAGCAGGAC |
| | GAGGAGGAGTTCCTGAAGTTCGTGATCCTGCACGCCGAGGACGACACCGACGAGGCCCTGAGAGTGCAGGAC |
| | CTGCTGCAGAACGACTTCGGCATCAGACCCGGCATCGTGTTCGCCGAGATGCCCTGCGGCAGACTGCACCTGC |
| | AGAACCTGGACGACGCCGTGAACGGCAGCGCCTGGACCATCCTGCTGCTGACCGAGAACTTCCTGAGAGACAC |
| | CTGGTGCAACTTCCAGTTCTACACCAGCCTGATGAACAGCGTGAGCAGACAGCACAAGTACAACAGCGTGATC |
| | CCCATGAGACCCCTGAACAGCCCCCTGCCCAGAGAGAGAACCCCCCTGGCCCTGCAGACCATCAACGCCCTGG |
| | AGGAGGAGAGCCAGGGCTTCAGCACCCAGGTGGAGAGAATCTTCAGAGAGAGCGTGTTCGAGAGACAGCAG |
| | AGCATCTGGAAGGAGACCAGAAGCGTGAGCCAGAAGCAGTTCATCGCC |
| | (Mouse TRAM(TICAM2); P4033 without epitope tag) - nucleotide |
| 1411 | ATGAGCACCGCCAGCGCCGCCAGCTCAAGCTCCTCCTCTAGCGCCGGCGAGATGATCGAGGCCCCCAGCCAGG |
| | TGCTGAACTTCGAGGAGATCGACTACAAGGAAATCGAGGTGGAGGAGGTGGTGGGCAGAGGCGCCTTCGGC |
| | GTGGTGTGCAAGGCCAAGTGGAGAGCCAAGGACGTGGCCATCAAGCAGATCGAGAGCGAGTCCGAGAGAAA |
| | GGCCTTCATCGTGGAGCTGAGACAGCTGAGCAGAGTGAACCACCCCAACATCGTGAAGCTGTACGGCGCCTGC |
| | CTGAACCCCGTGTGCCTGGTGATGGAGTACGCCGAGGGCGGCAGCCTGTACAACGTGCTGCACGGCGCCGAG |
| | CCCCTGCCCTACTACACCGCCGCCCACGCCATGAGCTGGTGCCTGCAGTGCAGCCAGGGCGTGGCCTACCTGCA |
| | CAGCATGCAGCCCAAGGCCCTGATCCACCGCGATCTGAAGCCCCCCAACCTGCTGCTGGTGGCCGGCGGCACC |
| | GTGCTGAAGATCTGCGACTTCGGCACCGCCTGCGACATCCAGACCCACATGACCAACAACAAGGGATCAGCTG |
| | CGTGGATGGCCCCCGAGGTGTTCGAGGGCAGCAACTACAGCGAGAAGTGCGACGTGTTCAGCTGGGGCATCA |
| | TCCTGTGGGAGGTGATCACCAGAAGAAAGCCCTTCGACGAGATCGGCGGCCCCGCCTTCAGAATCATGTGGGC |
| | CGTGCACAACGGCACCAGACCGCCGCTGATCAAGAACCTGCCCAAGCCCATCGAGTCCCTGATGACCAGATGC |
| | TGGAGCAAGGACCCGAGCCAGAGGCCCAGCATGGAAGAGATCGTTAAGATCATGACCCACCTGATGAGATAC |
| | TTCCCGGGCGCCGATGAACCGCTGCAGTACCCCTGCCAGGAGTTCGGCGGAGGCGGCGGCCAGAGCCCCACC |
| | CTGACCCTGCAGAGCACCAACACCCACACCCAGAGCAGCAGCAGTAGCAGCGACGGCGGCCTGTTCAGAAGC |
| | AGACCCGCCCACAGCCTGCCCCCCGGCGAGGACGGCAGAGTGGAGCCCTACGTGGACTTCGCCGAGTTCTACA |
| | GACTGTGGAGCGTGGACCACGGCGAGCAGAGCGTGGTGACCGCCCCC |
| | (human TAK1-TAB1; P4031 without epitope tag) - nucleotide |
| 1412 | ATGGAGAACCTGAAGCACATCATCACCCTGGGCCAGGTGATCCACAAGAGATGCGAGGAGATGAAGTACTGC |
| | AAGAAGCAGTGCAGAAGACTGGGCCACAGAGTGCTGGGCCTGATCAAGCCCCTGGAGATGCTGCAGGACCAG |
| | GGCAAGAGAAGCGTGCCCAGCGAGAAGCTGACCACCGCCATGAACAGATTCAAGGCCGCCCTGGAGGAGGCC |
| | AACGGCGAGATCGAGAAGTTCAGCAACAGAAGCAACATCTGCAGATTCCTGACCGCCAGCCAGGACAAGATCC |
| | TGTTCAAGGACGTGAACAGAAAGCTGAGCGACGTGTGGAAGGAGCTGAGCCTGCTGCTGCAGGTGGAGCAGA |
| | GAATGCCCGTGAGCCCCATCAGCCAGGGCGCCAGCTGGGCCCAGGAGGACCAGCAGGACGCCGACGAGGAC |
| | AGAAGAGCCTTCCAGATGCTGAGAAGAGACAACGAGAAGATCGAGGCCAGCCTGAGAAGACTGGAGATCAAC |
| | ATGAAGGAGATCAAGGAGACCCTGAGACAGTAC |
| | (human MLKL(1-180) ORF nucleotide sequence; no epitope tag) |
| 1413 | ATGGAGCACGACCTTGAGAGAGGCCCTCCGGGCCCTAGAAGACCTCCTCGAGGTCCTCCACTTAGCAGCAGCT |
| | TGGGCCTCGCTCTCTTATTGTTGCTACTTGCCTTGTTGTTCTGGTTGTACATCGTGATGAGCGACTGGACCGGCG |
| | GCGCCCTTCTGGTGCTGTACAGCTTCGCCCTGATGCTGATCATTATCATACTGATTATCTTCATATTCAGAAGAG |
| | ATCTGCTGTGCCCTCTGGGCGCCTTATGCATTCTGCTTTTGATGATCACTCTGCTCCTCATCGCACTCTGGAACCT |
| | GCACGGCCAGGCCCTGTTCCTGGGCATCGTGCTGTTCATCTTCGGCTGCCTCCTCGTGCTTGGAATCTGGATCTA |
| | CCTGCTGGAGATGCTGTGGAGACTAGGTGCCACCATCTGGCAGCTGCTGGCCTTCTTCCTGGCATTCTTCTTAG |
| | ACCTGATTCTGCTCATTATTGCCCTATACCTGCAGCAGAACTGGTGGACCCTACTCGTTGATCTCCTGTGGCTAC |
| | TGCTGTTCCTTGCTATCCTGATTTGGATGTACTACCACGGACAAAGACCTTTCGCCGAGGACAAGACCTACAAG |
| | TACATCTGCAGAAACTTCAGCAACTTCTGCAACGTGGACGTGGTGGAGATCCTGCCTTACCTGCCTTGCCTGAC |
| | CGCCAGGGACCAGGACAGACTGAGAGCCACCTGCACCCTGAGCGGCAACAGAGACACCCTGTGGCACCTGTTC |
| | AACACCCTGCAGAGGCGCCCTGGCTGGGTGGAGTACTTCATCGCCGCCCTGAGAGGCTGCGAGTTGGTTGACC |
| | TCGCCGACGAGGTGGCCAGCGTGTACCAGAGCTACCAGCCTAGAACCAGCGACAGGCCGCCTGACCCTCTGGA |
| | GCCTCCTAGCCTGCCTGCCGAACGGCCTGGCCCACCTACCCCTGCCGCCGCCCACAGCATCCCTTACAACTCCTG |
| | TCGGGAGAAGGAGCCTAGCTACCCTATGCCTGTGCAGGAAACGCAGGCCCCAGAAAGTCCTGGCGAGAACAG |
| | CGAGCAGGCCTTGCAGACTCTGAGCCCTAGAGCCATCCCTAGAAACCCTGACGGCGGTCCTCTCGAGAGTTCCA |
| | GCGACCTGGCTGCACTCTCCCCACTGACCAGCAGCGGCCACCAGGAGCAGGACACCGAGCTGGGCAGCACCCA |
| | CACCGCCGGCGCTACCTCAAGCCTTACCCCTAGCCGGGGCCCAGTCAGCCCTAGCGTGAGCTTCCAGCCTCTGG |
| | CCAGAAGCACACCAAGAGCCAGCAGACTTCCAGGACCAACCGGCAGCGTGGTGAGCACCGGCACCAGCTTCA |
| | GTTCCTCTAGCCCAGGCTTAGCCAGCGCCGGAGCGGCCGAGGGCAAGCAGGGCGCCGAGAGCGACCAGGCCG |
| | AGCCTATCATCTGTTCCTCGGGTGCCGAGGCCCCTGCCAACAGCCTACCTAGCAAGGTGCCTACCACACTGATG |
| | CCAGTTAACACCGTGGCCCTGAAGGTTCCAGCCAACCCTGCTTCCGTTTCTACAGTGCCGTCCAAGCTGCCGAC |
| | GTCATCCAAGCCTCCGGGAGCCGTGCCATCTAACGCCCTGACCAATCCAGCTCCAAGCAAGCTCCCAATCAACA |
| | GCACCAGAGCCGGCATGGTGCCTTCAAAGGTGCCGACCTCCATGGTGCTGACCAAGGTGAGCGCCTCTACCGT |
| | GCCAACCGACGGATCTTCTCGGAACGAGGAGACACCTGCTGCTCCTACTCCAGCGGGCGCAACTGGAGGCTCC |
| | TCGGCTTGGCTGGACAGTTCTAGCGAGAATAGAGGCCTGGGTAGTGAGCTGAGTAAGCCGGGCGTGCTCGCA |
| | AGCCAGGTGGACAGCCCTTTCAGCGGCTGCTTCGAAGACCTTGCAATTTCCGCATCTACCAGTCTAGGCATGGG |
| | CCCTTGCCACGGCCCTGAGGAGAACGAGTACAAGAGCGAGGGCACCTTCGGCATCCACGTGGCCGAGAACCCT |
| | AGCATCCAGCTGCTTGAGGGCAATCCTGGACCACCAGCCGATCCTGATGGCGGACCTAGACCTCAGGCCGACA |
| | GAAAGTTCCAGGAGAGAGAGGTGCCTTGTCATAGACCTTCCCCAGGCGCTCTTTGGCTGCAGGTGGCCGTGAC |
| | CGGTGTCCTCGTCGTGACATTACTGGTGGTGCTCTACAGAAGAAGACTGCAC |
| | (CA-hMAVS ORF nucleotide sequence; no epitope tag) |
| 1414 | ATGAGCTGGTCCCCAAGCCTCACGACCCAGACCTGCGGCGCTTGGGAGATGAAGGAGAGACTGGGCACGGGG |
| | GGCTTTGGCAACGTGATCAGATGGCATAATCAGGAAACCGGAGAGCAGATTGCTATCAAGCAGTGTAGACAG |
| | GAGCTAAGCCCCCGCAATAGAGAGAGGTGGTGCCTGGAAATTCAGATTATGAGAAGACTGACCCATCCCAATG |
| | TGGTCGCCGCAAGAGACGTCCCCGAAGGCATGCAGAACCTGGCCCCCAATGACCTGCCTCTTCTGGCCATGGA |
| | ATACTGCCAGGGCGGCGACCTGCGGAAGTACCTGAATCAGTTTGAAAATTGCTGCGGCCTGAGAGAGGGCGC |
| | CATATTGACACTGCTGAGCGACATCGCCAGCGCCCTGAGATACCTGCACGAGAACAGAATAATTCACAGAGAC |
| | CTGAAGCCGGAGAATATTGTGCTGCAGCAGGGTGAACAGAGGCTCATCCATAAGATCATCGACCTGGGGTACG |
| | CCAAGGAGCTGGATCAGGGCGAGCTGTGTACCGAGTTTGTGGGGACTCTGCAATACCTGGCCCCCGAGCTCCT |
| | GGAACAGCAGAAGTACACCGTCACAGTGGATTATTGGAGCTTCGGCACGCTGGCCTTCGAGTGCATCACGGGC |
| | TTTAGGCCGTTTCTGCCCAATTGGCAGCCCGTGCAATGGCACAGCAAGGTCAGACAGAAAAGCGAGGTCGACA |
| | TCGTAGTGAGCGAAGACCTGAACGGCACTGTCAAGTTCAGTAGCTCCCTCCCCTACCCTAACAATCTGAACAGC |
| | GTGCTGGCAGAGCGGCTGGAGAAGTGGCTACAACTAATGCTGATGTGGCACCCCCGACAGCGTGGCACCGAC |
| | CCCACCTACGGGCCCAACGGATGCTTCAAGGCCCTGGACGACATTCTCAACCTGAAGCTGGTGCACATCTTGAA |
| | TATGGTGACCGGCACCATCCACACCTACCCCGTGACCGAAGACGAAAGCTTGCAGAGCCTGAAGGCCAGAATT |
| | CAACAGGACACAGGCATCCCCGAAGAGGATCAAGAGCTGCTGCAGGAAGCCGGCCTGGCTTTGATTCCCGACA |
| | AACCAGCCACCCAGTGCATTAGCGACGGCAAGCTGAACGAGGGCCACACCCTGGACATGGACCTGGTGTTCCT |
| | GTTCGACAACAGCAAGATTACCTACGAGACCCAAATCAGCCCAAGGCCCCAACCCGAGAGCGTGAGCTGCATC |
| | CTGCAAGAGCCCAAGAGGAATCTGGCCTTCTTCCAACTAAGAAAGGTGTGGGGCCAAGTGTGGCACAGCATCC |
| | AGACTCTGAAGGAAGACTGCAATAGACTGCAACAAGGACAGCGAGCCGCCATGATGAACCTGTTAAGAAACA |
| | ACAGCTGCTTATCTAAGATGAAGAACAGCATGGCCTCCATGAGCCAGCAGCTGAAAGCCAAACTGGATTTCTTC |
| | AAGACCAGCATCCAGATCGACCTGGAGAAGTACAGCGAGCAGACGGAGTTCGGGATCACCAGCGACAAGCTG |
| | CTGCTGGCTTGGAGGGAAATGGAACAGGCCGTGGAGCTGTGCGGCAGAGAGAACGAGGTTAAACTGCTGGTA |
| | GAGCGGATGATGGCCCTGCAGACCGACATTGTAGACCTCCAGAGAAGCCCTATGGGAAGAAAACAGGGCGGA |
| | ACACTGGACGACCTGGAGGAGCAGGCTAGAGAGCTGTACAGAAGACTTAGAGAGAAGCCCAGAGACCAAAG |
| | AACCGAGGGCGACAGCCAGGAGATGGTGAGACTGCTGCTACAGGCTATTCAAAGTTTCGAGAAGAAAGTGAG |
| | AGTGATCTACACCCAACTCAGCAAAACCGTGGTGTGTAAGCAGAAGGCCCTGGAGCTGCTGCCCAAGGTTGAG |
| | GAGGTTGTCAGCCTGATGAATGAGGATGAGAAGACCGTGGTGAGACTGCAAGAGAAAAGGCAGAAAGAACT |
| | GTGGAACCTTTTAAAGATTGCCTGCAGCAAGGTGAGGGGCCCTGTATCAGGATCCCCCGACTCTATGAACGCC |
| | AGCAGACTGAGCCAGCCCGGTCAACTGATGAGCCAGCCCTCTACCGCCAGCAACTCCCTGCCCGAGCCAGCCA |
| | AGAAGAGCGAGGAACTGGTGGCCGAGGCCCACAATCTGTGCACCCTACTGGAGAACGCCATTCAGGACACCG |
| | TCGCGAGCAGGACCAGAGCTTCACCGCCCTGGACTGGAGCTGGCTGCAGACTGAGGAGGAAGAGCACAGCT |
| | GCCTGGAGCAGGCCAGC |
| | (huIKK2ca(S177E/S181E); P4005 without epitope tag) - nucleotide |
| 1415 | ATGAGCAGCGTGAAGCTCTGGCCCACCGGCGCCAGCGCCGTGCCCCTAGTGAGCCGGGAGGAGCTTAAGAAG |
| | CTCGAGTTCGTGGGCAAGGGCGGCTTCGGCGTGGTGTTCCGGGCCCACCACCGGACCTGGAACCACGACGTG |
| | GCCGTGAAGATCGTGAACAGCAAGAAGATCAGCTGGGAGGTGAAGGCCATGGTGAACCTGCGGAACGAGAA |
| | CGTGTTGCTGCTGCTGGGCGTGACCGAGGACCTGCAGTGGGACTTCGTGAGCGGCCAGGCCTTGGTTACCCGG |
| | TTCATGGAGAACGGCAGCCTGGCCGGCCTGCTGCAGCCCGAGTGCCCCCGGCCCTGGCCCCTGCTGTGCCGGC |
| | TACTGCAGGAGGTGGTGCTGGGCATGTGCTACCTGCACAGCCTGAACCCCCCACTTCTGCACCGGGACCTGAA |
| | GCCCAGCAACATCCTGCTGGACCCCGAGCTGCACGCCAAGCTGGCCGACTTCGGCCTGAGCACCTTCCAGGGC |
| | GGCAGCCAGAGCGGCTCCGGATCTGGCAGCGGAAGCCGGGACAGCGGCGGCACCCTGGCCTACCTGGACCCA |
| | GAGCTGCTGTTCGACGTGAACCTCAAGGCCAGCAAGGCCTCCGACGTGTACAGCTTCGGCATCCTGGTGTGGG |
| | CCGTGCTGGCTGGAAGGGAGGCCGAGCTGGTGGACAAGACCAGCCTGATCCGGGAGACAGTGTGCGACCGG |
| | CAGAGCCGGCCTCCTCTCACCGAACTGCCCCCCGGCAGCCCCGAGACTCCTGGCCTGGAGAAGCTGAAGGAGC |
| | TCATGATCCACTGCTGGGGCTCCCAGAGCGAGAACCGGCCCAGCTTCCAGGACTGCGAGCCCAAGACCAACGA |
| | GGTGTACAACCTGGTGAAGGACAAGGTGGACGCCGCCGTGAGCGAGGTCAAGCACTACCTGAGCCAGCACCG |
| | GAGCAGCGGCCGGAACCTGAGCGCCCGGGAGCCCAGCCAGCGGGGCACCGAGATGGACTGTCCTCGCGAGA |
| | CAATGGTGAGCAAGATGCTGGATCGGCTGCACCTGGAGGAGCCTTCAGGCCCCGTGCCCGGCAAGTGTCCTGA |
| | GAGACAGGCCCAGGACACCAGCGTGGGCCCTGCCACCCCTGCACGGACCAGCAGCGACCCCGTGGCCGGCAC |
| | CCCCCAGATCCCCCACACCCTGCCCTTCAGAGGCACCACTCCAGGCCCGGTGTTCACGGAGACACCTGGACCAC |
| | ACCCCCAGCGGAACCAGGGCGACGGTAGACACGGCACACCATGGTACCCATGGACACCTCCTAACCCCATGAC |
| | CGGTCCACCTGCCCTGGTGTTCAACAACTGCAGCGAGGTGCAGATCGGCAACTACAACAGCCTGGTGGCCCCT |
| | CCTAGGACCACCGCCAGCAGCAGCGCCAAGTACGATCAGGCACAGTTCGGCCGGGGCAGAGGTTGGCAGCCC |
| | TTCCACAAGGGAGGAATCAAGAAGGAGATCGAGGCCATTAAGAAGGAACAGGAAGCTATAAAGAAGAAGATT |
| | GAAGCTATCGAGAAGGAAATTGAGGCC |
| | (muRIPK3-IZ.Trimer; TH1015 with no epitope tag) - nucleotide |
| 1416 | ATGGCCGCTCTGAAGTCATGGCTCTCAAGAAGTGTGACCAGCTTCTTCAGGTATAGGCAGTGCCTGTGCGTGCC |
| | GGTCGTTGCTAACTTTAAAAAACGCTGTTTCAGCGAGCTGATTCGCCCATGGCACAAAACCGTGACCATCGGGT |
| | TCGGAGTCACACTGTGCGCTGTCCCAATCGCACAAGCTGTGTATACGCTTACCTCACTTTACAGACAGTACACAT |
| | CTTTGCTGGGAAAGATGAATTCTGAGGAGGAAGACGAGGTGTGGCAAGTTATTATTGGCGCCAGAGCCGAAA |
| | TGACATCGAAGCATCAGGAATACCTGAAACTTGAGACCACATGGATGACGGCAGTCGGACTCTCCGAGATGGC |
| | AGCCGAAGCAGCCTACCAGACAGGTGCCGACCAGGCTAGCATCACAGCTCGGAACCATATCCAATTGGTAAAG |
| | CTGCAGGTCGAAGAGGTCCACCAACTAAGCCGAAAAGCCGAAACCAAACTGGCTGAAGCCCAGATTGAAGAA |
| | CTGCGGCAAAAAACCCAGGAAGAGGGCGAGGAGCGAGCCGAATCTGAGCAAGAAGCTTATCTGCGGGAAGA |
| | T |
| | (Diablo.3; TH2003 without epitope tag) - nucleotide |
| 1417 | ATGGGCTGCGTGTGCAGCAGCAACCCCGAGGACGACTGGATGGAGAACGGCGGCATCAAGAAGGAGATAGA |
| | AGCCATTAAGAAAGAGCAGGAGGCCATCAAGAAGAAGATCGAGGCCATCGAGAAGGAGATCGAAGCCGGCA |
| | GCGGCGGCGGCAGCGGCAGTGGCGGCGGCAGCGACCCCTTCCTGGTGCTGCTGCACAGCTTAAGCGGCAGCC |
| | TGAGCGGCAACGACCTGATGGAGCTGAAGTTCCTGTGTAGAGAGAGAGTGAGCAAGAGAAAGCTGGAGAGA |
| | GTGCAGAGCGGCCTGGACCTGTTCACCGTGCTGCTGGAGCAGAACGACCTGGAAAGAGGCCACACCGGCTTG |
| | CTGAGAGAGTTGCTGGCCTCACTGAGAAGACACGATCTGCTGCAGAGACTGGACGACTTCGAGGCCGGCACC |
| | GCCACCGCCGCCCCCCCCGGAGAAGCCGACCTGCAGGTGGCCTTCGACATCGTGTGCGACAACGTGGGCAGA |
| | GACTGGAAGAGATTGGCCAGAGAGCTGAAGGTGAGCGAGGCCAAGATGGACGGCATCGAGGAGAAGTACCC |
| | CAGAAGCCTGAGCGAGAGAGTGAGAGAGAGCCTGAAGGTGTGGAAGAACGCCGAGAAGAAGAACGCCAGC |
| | GTGGCTGGGCTGGTGAAGGCCCTGAGAACCTGCAGACTGAACCTGGTGGCCGATCTGGTGGAGGAGGCCCAG |
| | GAGAGCGTGAGCAAGAGCGAGAACATGAGCCCCGTGCTGAGAGACAGCACCGTGAGTAGCAGCGAGACCCC |
| | C |
| | (Myr(Lck)-IZ-L-msFADD; TH3002 without epitope tag) - nucleotide |
| 1418 | ATGGGCTGCGTGTGCAGCAGCAACCCCGAGGACGACTGGATGGAGAACGGCGGCATCAAAAAGGAGATCGA |
| | GGCCATCAAGAAGGAGCAGGAGGCCATCAAGAAGAAGATCGAGGCCATCGAGAAAGAGATAGAGGCCGGCA |
| | GCGGCGGCGGCAGCGGCAGCGGCGGCGGCAGCCCCGGCGAGGAGGACCTGTGCGCCGCCTTCAACGTGATC |
| | TGCGACAACGTGGGCAAGGACTGGAGAAGACTGGCCAGACAGCTGAAGGTGAGCGACACCAAGATCGACAG |
| | CATCGAGGACAGATACCCCAGAAACCTGACCGAGAGAGTGAGAGAGAGCCTGAGAATCTGGAAGAACACCGA |
| | GAAGGAGAACGCCACCGTGGCCCACCTGGTGGGCGCCCTGAGAAGCTGCCAGATGAACCTGGTGGCCGACCT |
| | GGTGCAGGAGGTGCAGCAGGCCAGAGACCTGCAGAACAGAAGCGGCGCCATGAGCCCCATGAGCTGGAACA |
| | GC |
| | (Myr(Lck)-IZ-L-huFADD-DD; TH3003 without epitope tag) - nucleotide |
| 1419 | ATGGGCTGCGTGTGCAGCAGCAACCCCGAGGACGACTGGATGGAGAACGGCGGCATCAAGAAAGAGATCGA |
| | GGCCATCAAAAAGGAGCAGGAGGCCATCAAGAAGAAGATCGAGGCCATCGAGAAGGAGATCGAGGCCGGCT |
| | CTGGCGGCGGCAGCGGCAGCGGCGGCGGCAGCCCCCCCGGCGAGGCCGACTTACAGGTGGCCTTCGACATCG |
| | TGTGCGACAACGTGGGCAGAGACTGGAAGAGACTGGCCAGAGAGCTGAAGGTGAGCGAGGCCAAGATGGAC |
| | GGCATCGAGGAGAAGTACCCCAGAAGCCTGAGCGAGAGAGTGAGAGAGAGCCTGAAGGTGTGGAAGAACGC |
| | CGAGAAGAAGAACGCCAGCGTGGCCGGCCTGGTGAAGGCCCTGAGAACCTGCAGACTGAACCTGGTGGCCGA |
| | CCTGGTGGAGGAGGCCCAGGAGAGCGTGAGCAAGAGCGAGAACATGAGCCCCGTGCTGAGAGACAGCACCG |
| | TGAGC |
| | (Myr(Lck)-IZ-L-msFADD-DD; TH3004 without epitope tag) - nucleotide |
| 1420 | ATGGGCCAGACCGTGACCACCCCCCTGAGCCTCACCCTGGATCACTGGGGCGGCATCAAGAAAGAGATCGAG |
| | GCCATCAAGAAGGAGCAGGAGGCCATCAAGAAGAAGATCGAAGCCATCGAGAAGGAGATCGAGGCCGGCAG |
| | CGGCGGCGGCAGCGGCAGCGGCGGCGGCAGCGACCCCTTCCTGGTGCTGCTGCACAGCGTGTCCAGCAGCCT |
| | GAGCAGCAGCGAGCTGACCGAGCTGAAGTTCCTGTGCCTGGGCAGAGTGGGCAAAAGAAAGCTGGAGAGAG |
| | TGCAGAGCGGCCTGGACCTCTTCAGCATGCTGCTGGAGCAGAACGACTTGGAGCCCGGCCACACCGAGCTGCT |
| | GAGAGAGCTGCTGGCCAGCCTGCGGAGACACGACCTGCTGAGAAGAGTGGATGACTTCGAGGCCGGCGCCGC |
| | CGCCGGCGCCGCCCCCGGCGAGGAGGACCTGTGCGCCGCCTTCAACGTGATCTGCGACAACGTGGGCAAGGA |
| | TTGGAGAAGATTAGCCAGACAGCTGAAGGTGAGTGACACCAAGATTGACAGCATCGAGGACAGATACCCCAG |
| | AAACCTGACCGAGAGAGTCAGAGAGAGCCTGAGAATCTGGAAGAATACCGAGAAGGAGAACGCCACCGTGG |
| | CCCACCTGGTGGGCGCCCTGAGAAGCTGCCAGATGAACCTGGTGGCCGACCTGGTGCAGGAGGTGCAGCAGG |
| | CCAGAGACCTGCAGAACAGAAGCGGCGCCATGAGCCCCATGAGCTGGAACAGCGACGCCAGCACCAGCGAGG |
| | CCAGC |
| | (Myr(MMSV)-IZ-L-huFADD; TH3005 without epitope tag) - nucleotide |
| 1421 | ATGGGCCAGACAGTGACCACCCCCCTGTCCCTGACCTTGGACCACTGGGGCGGCATCAAGAAGGAGATCGAG |
| | GCCATCAAGAAGGAGCAGGAGGCCATCAAAAAGAAGATCGAAGCCATTGAGAAGGAGATCGAGGCCGGAAG |
| | CGGGGGCGGCAGCGGCAGCGGCGGAGGAAGCGACCCCTTCCTGGTGCTGCTGCATAGCCTGTCAGGCAGCCT |
| | GAGCGGCAACGATCTGATGGAGCTGAAGTTCCTGTGCCGCGAGAGAGTGAGCAAGAGAAAGCTGGAGAGAG |
| | TACAGAGCGGCCTGGACCTGTTCACCGTGCTGCTGGAGCAGAATGACCTGGAGAGAGGCCACACCGGCTTGCT |
| | GAGAGAGTTGCTGGCCAGCCTGAGAAGGCACGACCTGCTGCAGAGACTGGACGACTTCGAGGCCGGCACCGC |
| | CACCGCCGCCCCCCCCGGCGAAGCGGACCTGCAGGTGGCCTTCGACATCGTGTGCGACAACGTGGGCAGAGA |
| | CTGGAAGAGACTGGCCAGAGAACTGAAGGTGAGCGAGGCCAAAATGGACGGCATCGAGGAGAAGTACCCCA |
| | GAAGCCTGAGCGAGAGAGTGAGAGAGAGCCTGAAGGTGTGGAAGAACGCCGAGAAGAAGAACGCCAGCGT |
| | GGCCGGCCTGGTGAAGGCCCTGAGAACATGCAGACTGAACCTGGTGGCCGATCTTGTGGAGGAGGCCCAGGA |
| | GAGCGTGAGCAAGAGCGAAAACATGAGCCCCGTGCTGAGAGACAGCACCGTGAGCAGCAGCGAGACCCCC |
| | (Myr(MMSV)-IZ-L-msFADD; TH3006 without epitope tag) - nucleotide |
| 1422 | ATGGGCCAGACCGTGACCACCCCCCTGAGCCTGACCCTGGACCACTGGGGCGGCATCAAGAAGGAGATCGAG |
| | GCCATCAAGAAGGAGCAGGAGGCCATCAAGAAGAAGATTGAGGCTATCGAGAAGGAGATCGAGGCCGGCAG |
| | CGGCGGCGGCAGCGGCAGCGGCGGCGGCAGCCCCGGCGAGGAGGACCTGTGCGCCGCCTTCAACGTGATCT |
| | GCGACAACGTGGGCAAGGACTGGAGAAGACTGGCCAGACAGCTGAAGGTGAGCGACACCAAGATCGACAGC |
| | ATCGAGGACAGATACCCCAGAAACCTGACCGAGAGAGTGAGAGAGAGCCTGAGAATCTGGAAGAACACCGAG |
| | AAGGAGAACGCCACCGTGGCCCACCTGGTGGGCGCCCTGAGAAGCTGCCAGATGAACCTGGTGGCCGACCTG |
| | GTGCAGGAGGTGCAGCAGGCCAGAGACCTGCAGAACAGAAGCGGCGCCATGAGCCCCATGAGCTGGAACAG |
| | C |
| | (Myr(MMSV)-IZ-L-huFADD-DD; TH3007 without epitope tag) - nucleotide |
| 1423 | UCAAGCUUUUGGACCCUCGUACAGAAGCUAAUACGACUCACUAUAGGGAAAUAAGAGAGAAAAGAAGAG |
| | UAAGAAGAAAUAUAAGAGCCACC |
| | (5′ UTR) |
| 1424 | UGAUAAUAGGCUGGAGCCUCGGUGGCCAUGCUUCUUGCCCCUUGGGCCUCCCCCCAGCCCCUCCUCCCCU |
| | UCCUGCACCCGUACCCCCGUGGUCUUUGAAUAAAGUCUGAGUGGGCGGC |
| | (3′ UTR) |
| 1425 | UGAUAAUAGGCUGGAGCCUCGGUGGCCAUGCUUCUUGCCCCUUGGGCCCAAACACCAUUGUCACACUCCA |
| | UCCCCCCAGCCCCUCCUCCCCUUCCUCCAUAAAGUAGGAAACACUACAUGCACCCGUACCCCCGUGGUCUU |
| | UGAAUAAAGUCUGAGUGGGCGGC |
| | (3′ UTR with mi-122 and mi-142-3p sites) |
| 1426 | GGAAGCGGAGCUACUAACUUCAGCCUGCUGAAGCAGGCUGGAGACGUGGAGGAGAACCCUGGACCU |
| | (Nucleotide sequence encoding 2A peptide) |
| 1427 | UCCGGACUCAGAUCCGGGGAUCUCAAAAUUGUCGCUCCUGUCAAACAAACUCUUAACUUUGAUUUACUC |
| | AAACUGGCUGGGGAUGUAGAAAGCAAUCCAGGUCCACUC |
| | (Nucleotide sequence encoding 2A peptide) |
| 1428 | AUGGAACGCCCCCCUGGACUGAGGCCUGGAGCAGGAGGACCCUGGGAAAUGCGCGAACGGCUGGGUACU |
| | GGUGGUUUCGGCAACGUGUGCCUCUACCAGCAUCGGGAGUUGGACCUGAAGAUCGCCAUCAAGUCCUGC |
| | CGCCUGGAGCUGUCGACCAAGAACCGGGAACGCUGGUGUCAUGAAAUCCAGAUUAUGAAAAAGCUGAAC |
| | CACGCUAACGUGGUCAAAGCUUGCGACGUGCCCGAAGAACUGAAUAUCCUGAUCCACGAUGUGCCCCUCC |
| | UCGCAAUGGAGUACUGCAGCGGAGGCGAUCUCCGGAAGCUGCUCAACAAGCCGGAGAACUGCUGUGGCC |
| | UUAAAGAGAGCCAGAUUCUGAGCCUUCUGUCGGACAUCGGCUCGGGUAUCCGAUAUCUUCACGAGAACA |
| | AGAUUAUUCACAGAGAUCUGAAGCCAGAGAACAUCGUGCUGCAAGAUGUCGGAGGAAAGAUCAUUCAUA |
| | AGAUCAUCGACCUGGGAUACGCCAAGGACGUGGAUCAAGGCGAACUGUGCACCGAAUUCGUGGGAACCC |
| | UCCAGUACCUGGCCCCGGAACUGUUCGAAAACAAACCCUACACCGCCACCGUGGACUACUGGUCCUUUGG |
| | AACUAUGGUGUUCGAGUGUAUAGCUGGCUACCGGCCAUUUCUCCAUCACUUGCAGCCCUUCACCUGGCA |
| | CGAAAAGAUCAAGAAGAAGGACCCCAAGUGCAUUUUCGCGUGCGAAGAGAUGUCGGGGGAAGUGCGCUU |
| | CUCGUCCCACUUGCCCCAGCCCAACUCCCUGUGCUCCCUGGUGGUCGAACCGAUGGAAAACUGGCUGCAA |
| | CUGAUGCUGAACUGGGAUCCUCAACAGCGCGGUGGACCAGUGGAUCUGACUCUGAAGCAGCCCAGAUGC |
| | UUCGUGCUGAUGGACCAUAUCCUGAACCUCAAGAUCGUCCACAUCCUGAACAUGACCUCCGCCAAGAUCA |
| | UUUCCUUCCUCCUCCCGCCCGAUGAGAGCCUGCACUCACUGCAGUCCAGAAUCGAGAGGGAAACCGGUAU |
| | UAACACUGGGUCACAGGAACUCCUGUCCGAAACCGGAAUCUCUCUGGACCCUCGCAAGCCAGCAUCCCAG |
| | UGCGUCCUGGAUGGGGUCAGGGGAUGCGACUCGUACAUGGUCUACCUCUUCGAUAAGUCAAAGACCGUC |
| | UACGAGGGACCCUUUGCCAGCCGGAGCCUGUCAGACUGCGUGAACUACAUCGUGCAGGACUCUAAGAUU |
| | CAGCUGCCAAUUAUCCAGCUCCGGAAAGUCUGGGCAGAAGCGGUGCACUACGUGUCCGGACUGAAAGAG |
| | GACUACUCCCGGCUGUUCCAGGGCCAGAGGGCAGCCAUGCUGUCCCUGCUCCGCUACAACGCCAACCUCAC |
| | GAAGAUGAAGAACACCCUGAUCUCCGCGUCACAACAACUGAAGGCCAAGCUGGAAUUCUUCCACAAGUCC |
| | AUUCAAUUGGAUCUGGAGCGGUACUCCGAGCAGAUGACUUACGGCAUUAGCUCCGAAAAGAUGCUCAAG |
| | GCCUGGAAGGAGAUGGAGGAGAAGGCCAUUCAUUAUGCCGAAGUGGGGGUGAUCGGAUACCUGGAGGA |
| | UCAGAUCAUGUCCCUUCAUGCCGAGAUUAUGGAACUCCAGAAGUCCCCGUACCGGAGGCAGGGCGAUUU |
| | GAUGGAGAGCUUGGAACAACGCGCCAUCGACCUGUACAAGCAGCUCAAGCACAGACCGAGCGACCACUCG |
| | UACUCCGACUCGACUGAGAUGGUGAAAAUUAUCGUGCACACCGUGCAGUCCCAAGACCGGGUCCUGAAG |
| | GAGCUGUUCGGACACCUGAGCAAGCUGCUGGGGUGCAAGCAAAAGAUCAUUGACCUUCUGCCAAAAGUG |
| | GAGGUGGCCCUGAGCAACAUUAAGGAAGCCGACAACACCGUGAUGUUCAUGCAGGGCAAGCGGCAGAAG |
| | GAGAUCUGGCAUCUUCUCAAGAUCGCGUGUACCCAGGCUGCAGCGAGAGCCUUGGUGGGCGCUGCCCUG |
| | GAAGGUGCCGUGGCACCACAGGCCGCUGCUUGGCUGCCUCCUGCUGCUGCUGAGCACGAUCACGCACUGG |
| | CCUGCGUGGUGGCACCGCAGGACGGAGAGGCUGCCGCGCAGAUGAUCGAGGAAAACCUGAACUGCCUGG |
| | GUCACCUGGCUGCCAUCAUCCACGAAGCCAACGAGGAGCAAGGAAACAGCAUGAUGAAUCUCGACUGGAG |
| | CUGGCUGACUGAG |
| | Human constitutively active IKK alpha (PEST mutation) P.4013/4014 without epitope |
| | tag - nucleotide |
| 1429 | AUGGAAAGACCGCCUGGAUUGCGACCUGGAGCCGGAGGACCCUGGGAAAUGAGAGAGAGAUUGGGUACU |
| | GGAGGCUUCGGAAAUGUCUCGCUGUACCAGCACCGCGAGCUCGACCUGAAGAUCGCGAUCAAGUCCUGU |
| | CGCCUGGAGCUGUCCAGCAAGAACAGAGAGCGGUGGUGCCACGAGAUCCAGAUUAUGAAGAAGCUGGAC |
| | CAUGCCAACGUCGUGAAGGCUUGCGAUGUCCCGGAGGAACUCAAUUUCCUUAUUAACGACGUGCCGCUU |
| | CUCGCGAUGGAGUACUGCUCAGGCGGCGACUUGCGCAAGCUGCUUAACAAGCCCGAAAACUGCUGCGGU |
| | CUGAAGGAAUCCCAAAUUCUGUCACUCCUGUCCGAUAUUGGCUCAGGAAUCCGCUACCUUCAUGAGAAU |
| | AAGAUCAUCCACCGCGACCUGAAGCCUGAGAACAUUGUGCUGCAGGAUGUCGGGGGAAAGACUAUCCACA |
| | AGAUAAUCGACCUGGGAUACGCCAAGGACGUCGAUCAAGGGGAACUGUGCACCGAAUUCGUGGGGACUC |
| | UCCAGUACUUGGCCCCCGAACUGUUUGAAAACAAGCCCUACACCGCCACCGUGGAUUACUGGUCCUUCGG |
| | GACUAUGGUGUUCGAGUGUAUUGCCGGCUAUCGCCCCUUUCUGCACCACCUCCAGCCCUUUACUUGGCA |
| | CGAAAAGAUCAAGAAGAAGGAUCCGAAGUGCAUCUUCGCUUGCGAAGAGAUGACCGGAGAAGUCCGGUU |
| | UUCCAGCCAUCUGCCUCAGCCGAACUCCCUGUGUUCCCUGAUUGUGGAACCCAUGGAGAGCUGGUUGCA |
| | GCUCAUGCUCAACUGGGAUCCGCAGCAACGCGGUGGCCCAAUCGAUCUUACCCUUAAGCAGCCUCGGUGC |
| | UUCGCGCUGAUGGACCACAUCCUCAAUCUGAAGAUCGUGCACAUCCUGAACAUGACUUCCGCCAAGAUCA |
| | UCUCCUUCCUGCUGCCGUGCGACGAAAGCCUGCACUCACUGCAGAGCCGGAUCGAACGGGAGACAGGCAU |
| | AAACACGGGAUCGCAAGAACUGCUGUCCGAAACCGGCAUCUCCCUGGACCCACGGAAGCCUGCCUCCCAAU |
| | GCGUCCUGGACGGAGUGCGGGGUUGCGACUCAUACAUGGUGUACCUCUUCGAUAAGUCAAAGACCGUGU |
| | AUGAAGGACCCUUCGCCUCCCGCUCCCUGAGCGACUGCGUGAACUACAUCGUGCAGGACUCGAAGAUCCA |
| | GCUGCCGAUUAUCCAGCUUCGGAAGGUCUGGGCGGAGGCUGUGCACUACGUGUCCGGUUUGAAAGAGG |
| | AUUAUAGCCGCCUGUUCCAGGGACAGAGAGCCGCCAUGCUGUCCCUCCUCCGGUACAACGCCAACCUGAC |
| | CAAGAUGAAGAACACCCUGAUCAGCGCCUCGCAGCAGCUGAAGGCCAAGCUGGAGUUCUUCCGGAAGUCG |
| | AUCCAGCUCGACCUCGAAAGGUACUCAGAACAGAUGACCUACGGAAUUUCCUCCGAGAAGAUGCUGAAAG |
| | CCUGGAAGGAAAUGGAGGAGAAGGCCAUUCACUACUCCGAAGUGGGCGUCAUUGGCUACUUGGAGGACC |
| | AAAUCAUGUCUCUGCACACCGAAAUCAUGGAACUCCAGAAGUCGCCUUACGGACGACGCCAAGGGGACCU |
| | GAUGGAGAGCCUGGAACAGCGGGCCAUCGAUCUGUACAAGCAACUGAAGCAUAGGCCGCCCGACCAUCUC |
| | UACUCCGACUCGACUGAAAUGGUGAAGAUUAUUGUGCAUACAGUGCAGAGCCAGGACAGAGUGCUGAAG |
| | GAGCUGUUCGGCCACCUGUCCAAGCUCCUGGGUUGCAAGCAGAAGAUUAUCGAUCUGUUGCCCAAGGUG |
| | GAAGUGGCCCUGUCUAACAUCAAAGAAGCCGACAACACUGUGAUGUUUAUGCAAGGAAAGCGGCAGAAA |
| | GAAAUCUGGCACCUUCUGAAAAUCGCGUGCACCCAGGCUGCAGCUAGGGCACUCGUGGGUGCAGCGCUU |
| | GAAGGCGCCGUGGCACCUCCUGUCGCUGCCUGGUUGCCACCCGCGCUUGCUGACAGAGAGCACCCACUGA |
| | CUUGUGUGGUGGCCCCACAGGACGGAGAAGCACUGGCCCAGAUGAUUGAGGAGAACCUGAACUGUCUGG |
| | GACACCUUGCCGCCAUUAUCCGGGAGGCCAACGAGGACCAGUCCUCGUCCCUGAUGUCCCUGGAUUGGUC |
| | AUGGCUCGCUGAA |
| | Mouse constitutively active IKK alpha (PEST mutation) P.4017/4018 without epitope |
| | tag - nucleotide |
| 1430 | AUGAGCUGGAGCCCUUCACUGCCAACCCAAACCUGUGGAGCCUGGGAAAUGAAAGAAAGACUGGGAACCG |
| | GAGGUUUCGGCAACGUGAUCCGCUGGCAUAACCAGGCCACUGGGGAGCAGAUUGCCAUCAAGCAGUGCC |
| | GGCAGGAGCUGUCCCCGAAGAACCGCAACCGGUGGUGCCUGGAAAUCCAGAUCAUGCGGCGGCUUAACCA |
| | CCCCAACGUGGUCGCCGCGAGAGAUGUGCCGGAGGGCAUGCAAAACCUGGCCCCCAACGAUCUCCCGCUG |
| | UUGGCGAUGGAGUAUUGCCAGGGUGGCGAUCUGCGGCGCUACCUGAAUCAAUUCGAGAACUGCUGCGG |
| | UCUGCGCGAAGGAGCUGUGCUUACGCUGCUCUCGGACAUCGCCUCGGCGCUGAGAUACCUCCACGAAAAU |
| | CGGAUCAUCCACCGAGAUCUCAAGCCGGAAAACAUUGUGCUUCAGCAAGGGGAAAAGCGCCUCAUCCAUA |
| | AGAUCAUCGAUCUCGGCUACGCCAAGGAGUUGGACCAGGGGGAGCUCUGCACUGAAUUCGUGGGAACUC |
| | UGCAGUACUUGGCGCCCGAACUGCUGGAGCAACAGAAGUACACUGUGACCGUGGACUACUGGUCCUUUG |
| | GAACCCUGGCCUUCGAGUGCAUUACUGGCUUCCGGCCUUUCCUUCCAAACUGGCAGCCGGUGCAGUGGC |
| | ACUCAAAGGUCCGCCAGAAGUCCGAAGUGGACAUCGUGGUGUCCGAGGACUUGAACGGCGCCGUGAAGU |
| | UCUCGUCCUCCCUGCCCUUCCCGAACAACCUCAACUCCGUGCUGGCCGAGAGGCUGGAAAAGUGGCUGCA |
| | GCUUAUGCUGAUGUGGCACCCUAGACAGCGCGGAACUGAUCCGCAGUACGGCCCGAACGGCUGUUUUAG |
| | GGCCCUGGACGACAUUCUGAACCUGAAACUCGUCCACGUGCUUAACAUGGUCACCGGUACCGUCCAUACC |
| | UAUCCGGUCACCGAGGACGAAUCCCUGCAGUCCCUCAAGACUCGGAUUCAGGAGAAUACCGGCAUUCUGG |
| | AAACCGACCAGGAGCUGCUGCAGAAGGCCGGACUGGUGCUGCUCCCCGAUAAGCCCGCAACCCAGUGCAU |
| | CUCAGACUCCAAGACCAACGAGGGCCUGACUCUCGACAUGGACCUGGUGUUCCUGCUCGACAACAGCAAG |
| | AUCAACUACGAAACCCAAAUUACCCCUAGACCACCACCUGAAUCCGUGAGCUGCAUACUGCAGGAGCCCAA |
| | GCGCAACCUCUCCUUCUUCCAACUCCGGAAGGUCUGGGGCCAAGUGUGGCACUCCAUUCAGACUCUGAAG |
| | GAAGAUUGUAACAGGCUGCAGCAGGGACAGAGAGCCGCCAUGAUGAGCCUUCUGAGGAACAACUCUUGC |
| | CUGUCAAAGAUGAAGAACGCCAUGGCUUCCACCGCGCAGCAGUUGAAGGCGAAGCUGGACUUCUUUAAG |
| | ACCUCCAUCCAAAUCGACCUGGAGAAGUACAAGGAACAGACUGAGUUCGGGAUUACGAGCGAUAAACUCC |
| | UGCUCGCUUGGCGGGAAAUGGAGCAAGCAGUGGAGCAGUGCGGACGGGAGAACGACGUCAAGCAUCUCG |
| | UGGAGCGGAUGAUGGCGCUGCAGACCGACAUUGUCGACUUGCAGCGCUCUCCAAUGGGACGGAAGCAGG |
| | GAGGGACUCUGGACGAUCUGGAGGAACAGGCCCGGGAACUGUACAGAAAGCUGAGGGAGAAGCCCCGGG |
| | AUCAAAGAACCGAAGGAGACUCGCAAGAGAUGGUGCGCCUGCUGCUGCAGGCGAUCCAGUCCUUCGAGA |
| | AGAAGGUCCGCGUGAUCUACACUCAGCUGUCCAAGACCGUGGUCUGUAAACAGAAGGCCCUGGAACUGC |
| | UCCCGAAAGUGGAAGAAGUGGUGUCGCUCAUGAAUGAGGACGAGAGAACCGUGGUGCGCCUCCAAGAAA |
| | AGCGGCAGAAGGAACUCUGGAACCUCCUCAAGAUUGCCUGCUCGAAAGUGCGGGGACCUGUGGCUGGUG |
| | CUCCUGACGCCAUGAACGUGGCCAGGCUUGCUCACCCUGGCCAACUUAUGGCCCAGCCUGCAUCCGCCUG |
| | UGACGCACUGCCCGAGUCGGACAAGAAGGCCGAAGAACUGGUCGCCGAAGCCCACGCACUGUGCAGCCGC |
| | CUGGAAAGCGCGCUGCAGGACACCGUGAAGGAGCAGGACCGCAGCUUUACCACUCUUGAUUGGUCCUGG |
| | CUGCAAAUGGAGGACGAAGAACGGUGCUCCCUGGAACAGGCCUGCGAC |
| | Mouse constitutively active IKK beta (PEST mutation) P.4019/4020 without epitope |
| | tag - nucleotide |
| 1431 | AUGACCGAGUACAAGCUGGUGGUGGUGGGCGCCGACGGCGUGGGCAAGAGCGCCCUGACCAUCCAGCUG |
| | AUCCAG |
| | (KRAS G12D 25 mer nucleotide sequence) |
| 1432 | AUGACCGAGUACAAGCUGGUGGUGGUGGGCGCCGUGGGCGUGGGCAAGAGCGCCCUGACCAUCCAGCUG |
| | AUCCAG |
| | (KRAS G12V 25 mer nucleotide sequence) |
| 1433 | AUGACCGAGUACAAGCUGGUGGUGGUGGGCGCCGGCGACGUGGGCAAGAGCGCCCUGACCAUCCAGCUG |
| | AUCCAG |
| | (KRAS G13D 25 mer nucleotide sequence) |
| 1434 | AUGACCGAGUACAAGUUAGUGGUUGUGGGCGCCGACGGCGUGGGCAAGAGCGCCCUCACCAUCCAGCUU |
| | AUCCAGAUGACGGAAUAUAAGUUAGUAGUAGUGGGAGCCGACGGUGUCGGCAAGUCCGCUUUGACCAU |
| | UCAACUUAUUCAGAUGACAGAGUAUAAGCUGGUCGUUGUAGGCGCAGACGGCGUUGGAAAGUCGGCAC |
| | UGACGAUCCAGUUGAUCCAG |
| | (KRAS G12D 25 mer\hat{ }3 nucleotide sequence) |
| 1435 | AUGACCGAGUACAAGCUCGUCGUGGUGGGCGCCGUGGGCGUGGGCAAGAGCGCCCUAACCAUCCAGUUG |
| | AUCCAGAUGACCGAAUAUAAGCUCGUGGUAGUCGGAGCGGUGGGCGUUGGCAAGUCAGCGCUAACAAUA |
| | CAACUAAUCCAAAUGACCGAAUACAAGCUAGUUGUAGUCGGUGCCGUCGGCGUUGGAAAGUCAGCCCUU |
| | ACAAUUCAGCUCAUUCAG |
| | (KRAS G12V 25 mer\hat{ }3 nucleotide sequence) |
| 1436 | AUGACCGAGUACAAGCUCGUAGUGGUUGGCGCCGGCGACGUGGGCAAGAGCGCCCUAACCAUCCAGCUCA |
| | UCCAGAUGACAGAAUAUAAGCUUGUGGUUGUGGGAGCAGGAGACGUGGGAAAGAGUGCGUUGACGAUU |
| | CAACUCAUACAGAUGACCGAAUACAAGUUGGUGGUGGUCGGCGCAGGUGACGUUGGUAAGUCUGCACUA |
| | ACUAUACAACUGAUCCAG |
| | (KRAS G13D 25 mer\hat{ }3 nucleotide sequence) |
| 1437 | AUGACCGAGUACAAGCUGGUGGUGGUGGGCGCCUGCGGCGUGGGCAAGAGCGCCCUGACCAUCCAGCUG |
| | AUCCAG |
| | (KRAS G12C 25 mer nucleotide sequence) |
| 1438 | AUGACCGAGUACAAGCUCGUGGUUGUUGGCGCCUGCGGCGUGGGCAAGAGCGCCCUCACCAUCCAGCUC |
| | AUCCAGAUGACAGAGUAUAAGUUAGUCGUUGUCGGAGCUUGCGGAGUUGGAAAGUCGGCGCUCACCAU |
| | UCAACUCAUACAAAUGACAGAAUAUAAGUUAGUGGUGGUGGGUGCGUGUGGCGUUGGCAAGAGUGCGC |
| | UUACUAUCCAGCUCAUUCAG |
| | (KRAS G12C 25 mer\hat{ }3 nucleotide sequence) |
| 1439 | AUGACCGAGUACAAGCUGGUGGUGGUGGGCGCCGGCGGCGUGGGCAAGAGCGCCCUGACCAUCCAGCUG |
| | AUCCAG |
| | (KRAS WT 25 mer nucleotide sequence) |
| 1440 | GGGAAAUAAGAGAGAAAAGAAGAGUAAGAAGAAAUAUAAGAGCCACC |
| | (5′ UTR sequence; no promoter) |
| 1441 | AUGACCGAGUACAAGCUCGUUGUAGUCGGCGCCGACGGCGUGGGCAAGAGCGCCUUGACCAUCCAGUUG |
| | AUCCAGAUGACCGAAUAUAAGUUGGUGGUGGUAGGCGCAGUGGGAGUUGGCAAGUCAGCACUCACAAU |
| | UCAGCUCAUUCAAAUGACAGAAUACAAGUUAGUCGUUGUAGGAGCAGGCGACGUCGGCAAGAGUGCCUU |
| | AACCAUUCAACUAAUCCAG |
| | (KRAS(G12D G12V G13D) 75 mer “3MUT” nt. seq) |
| 1442 | AUGCCUCACAGCAGCCUGCACCCUAGCAUCCCUUGCCCUAGAGGCCACGGCGCCCAGAAGGCCGCCCUGGU |
| | GCUGCUGAGCGCCUGCCUGGUGACCCUGUGGGGCCUGGGCGAGCCUCCUGAGCACACCCUGAGAUACCU |
| | GGUGCUGCACCUGGCCAGCCUGCAGCUGGGCCUGCUGCUGAACGGCGUGUGCAGCCUGGCCGAGGAGCU |
| | GAGACACAUCCACAGCAGAUACAGAGGCAGCUACUGGAGAACCGUGAGAGCCUGCCUGGGCUGCCCUCUG |
| | AGAAGAGGCGCCCUGCUGCUGCUGAGCAUCUACUUCUACUACAGCCUGCCUAACGCCGUGGGCCCUCCUU |
| | UCACCUGGAUGCUGGCCCUGCUGGGCCUGAGCCAGGCCCUGAACAUCCUGCUGGGCCUGAAGGGCCUGG |
| | CCCCUGCCGAGAUCAGCGCCGUGUGCGAGAAGGGCAACUUCAACGUGGCCCACGGCCUGGCCUGGAGCUA |
| | CUACAUCGGCUACCUGAGACUGAUCCUGCCUGAGCUGCAGGCCAGAAUCAGAACCUACAACCAGCACUAC |
| | AACAACCUGCUGAGAGGCGCCGUGAGCCAGAGACUGUACAUCCUGCUGCCUCUGGACUGCGGCGUGCCU |
| | GACAACCUGAGCAUGGCCGACCCUAACAUCAGAUUCCUGGACAAGCUGCCUCAGCAGACCGGCGACCACGC |
| | CGGCAUCAAGGACAGAGUGUACAGCAACAGCAUCUACGAGCUGCUGGAGAACGGCCAGAGAGCCGGCACC |
| | UGCGUGCUGGAGUACGCCACCCCUCUGCAGACCCUGUUCGCCAUGAGCCAGUACAGCCAGGCCGGCUUCA |
| | GCAGAGAGGACACCCUGGAGCAGGCCAAGCUGUUCUGCAGAACCCUGGAGGACAUCCUGGCCGACGCCCC |
| | UGAGAGCCAGAACAACUGCAGACUGAUCGCCUACCAGGAGCCUGCCGACGACAGCAGCUUCAGCCUGAGC |
| | CAGGAGGUGCUGAGACACCUGAGACAGGAGGAGAAGGAGGAGGUGACCGUGGGCAGCCUGAAGACCAGC |
| | GCCGUGCCUAGCACCAGCACCAUGAGCCAGGAGCCUGAGCUGCUGAUCAGCGGCAUGGAGAAGCCUCUGC |
| | CUCUGAGAACCGACUUCAGC |
| | (Hu STING(R284U); no epitope tag; nucleotide sequence) |
| 1443 | AUGCCCCACAGCAGCCUGCACCCCUCCAUCCCCUGUCCCAGAGGCCACGGCGCCCAGAAGGCCGCCCUGGU |
| | GCUGCUGAGCGCCUGCCUGGUGACCUUAUGGGGCCUGGGCGAGCCCCCCGAGCACACCCUGAGAUACCUG |
| | GUCCUGCACCUGGCCAGCCUCCAGCUGGGCCUGCUGCUCAACGGCGUGUGUAGCCUGGCCGAGGAGCUG |
| | AGACACAUCCACAGCAGAUACAGAGGCAGCUACUGGAGAACCGUGAGAGCCUGCCUGGGUUGCCCACUGA |
| | GAAGAGGAGCUCUGCUGCUGCUGAGCAUCUACUUCUACUACUCGCUGCCCAACGCUGUGGGCCCCCCCUU |
| | CACCUGGAUGCUGGCCCUGCUGGGUCUGAGCCAGGCCCUGAACAUCCUCCUGGGCCUGAAGGGCCUGGCC |
| | CCCGCCGAGAUAAGCGCCGUUUGCGAGAAGGGCAACUUCAACGUGGCCCAUGGCCUGGCCUGGAGCUACU |
| | ACAUCGGCUACUUACGCCUGAUCCUGCCCGAGCUGCAGGCCAGAAUCAGAACCUACAACCAGCAUUACAAC |
| | AACCUGCUGAGAGGCGCCGUGAGCCAGAGACUGUAUAUCCUGCUGCCCCUGGACUGCGGCGUGCCCGACA |
| | ACCUGAGCAUGGCCGACCCCAACAUCAGAUUCCUGGACAAGCUCCCCCAGCAGACCGGCGACCACGCCGGA |
| | AUCAAAGACAGAGUGUAUAGCAACAGCAUCUACGAGCUGCUGGAGAACGGCCAGAGAGCCGGCACCUGCG |
| | UACUGGAGUACGCCACCCCCUUGCAGACCCUGUUUGCCAUGAGCCAGUACAGCCAGGCCGGCUUCAGCAG |
| | AGAGGACAUGCUGGAGCAGGCCAAGCUGUUCUGCAGAACCCUGGAGGACAUCCUGGCCGACGCCCCCGAG |
| | AGCCAGAACAACUGCAGACUGAUCGCCUACCAAGAGCCCGCCGACGACAGCAGCUUCAGCUUAAGCCAGGA |
| | GGUGCUGAGACAUCUGAGACAGGAGGAGAAGGAGGAGGUGACCGUGGGCAGCCUCAAGACCAGCGCUGU |
| | GCCCUCUACCAGCACCAUGAGCCAGGAGCCCGAGCUGCUGAUCAGCGGCAUGGAGAAGCCCCUGCCCCUG |
| | AGAACAGACUUCAGC |
| | (hu STING (R284M); no epitope tag; nucleotide sequence) |
| 1444 | AUGCCCCAUAGCAGCCUGCACCCCAGCAUCCCCUGCCCCAGAGGCCACGGCGCCCAGAAGGCCGCCCUGGU |
| | CCUGCUGAGCGCAUGCCUGGUCACCCUGUGGGGCCUGGGCGAGCCCCCCGAGCACACCCUGAGAUACCUG |
| | GUGCUGCACCUCGCCAGCCUGCAGCUGGGCCUGCUGCUGAACGGCGUGUGCAGCCUGGCCGAGGAGCUG |
| | AGACACAUCCACAGCAGAUAUAGAGGCAGCUACUGGAGAACCGUGAGAGCUUGCCUCGGCUGCCCCCUGA |
| | GAAGAGGCGCCCUGCUGCUGCUGAGCAUCUACUUUUACUACAGCCUGCCCAACGCUGUGGGCCCCCCUUU |
| | CACGUGGAUGCUCGCCCUGCUGGGACUGAGCCAGGCCCUGAACAUCCUGCUGGGCCUUAAGGGCCUAGCC |
| | CCCGCCGAGAUCAGCGCCGUGUGCGAGAAGGGCAACUUCAAUGUGGCCCACGGCCUGGCCUGGAGCUACU |
| | ACAUCGGCUACCUGAGACUGAUCCUGCCCGAGCUGCAGGCCAGAAUCAGAACCUACAAUCAGCACUACAAC |
| | AACCUGCUGAGAGGCGCCGUGAGCCAGAGACUGUACAUCCUGCUGCCCCUGGACUGCGGCGUGCCCGACA |
| | ACCUCAGCAUGGCCGACCCCAACAUCAGAUUCCUGGACAAGCUGCCCCAGCAGACCGGCGACCACGCCGGC |
| | AUCAAGGAUCGCGUGUACAGCAACAGCAUCUACGAGCUGCUGGAAAACGGCCAGAGAGCCGGAACCUGCG |
| | UGCUGGAGUACGCCACACCCCUGCAGACCCUGUUCGCCAUGAGCCAGUACAGCCAGGCCGGCUUCAGCAG |
| | AGAGGACAAGCUGGAGCAGGCCAAGCUGUUCUGCAGAACCCUGGAGGAUAUCCUCGCCGACGCCCCCGAG |
| | AGCCAGAACAACUGCAGGCUGAUCGCGUACCAGGAGCCCGCUGACGACAGCAGCUUUAGCCUGAGCCAGG |
| | AGGUGCUGAGACAUCUGCGUCAAGAGGAAAAGGAGGAGGUGACCGUGGGCUCCCUGAAGACCAGCGCCG |
| | UGCCCAGCACCAGCACCAUGAGCCAGGAGCCCGAGCUGCUGAUCAGCGGCAUGGAGAAGCCACUGCCCCUC |
| | AGAACCGACUUCAGC |
| | (Hu STING (R284K); no epitope tag; nucleotide sequence) |
| 1445 | AUGCCUCACAGCAGCCUGCACCCUAGCAUCCCUUGCCCUAGAGGCCACGGCGCCCAGAAGGCCGCCCUGGU |
| | GCUGCUGAGCGCCUGCCUGGUGACCCUGUGGGGCCUGGGCGAGCCUCCUGAGCACACCCUGAGAUACCU |
| | GGUGCUGCACCUGGCCAGCCUGCAGCUGGGCCUGCUGCUGAACGGCGUGUGCAGCCUGGCCGAGGAGCU |
| | GAGACACAUCCACAGCAGAUACAGAGGCAGCUACUGGAGAACCGUGAGAGCCUGCCUGGGCUGCCCUCUG |
| | AGAAGAGGCGCCCUGCUGCUGCUGAGCAUCUACUUCUACUACAGCCUGCCUAACGCCGUGGGCCCUCCUU |
| | UCACCUGGAUGCUGGCCCUGCUGGGCCUGAGCCAGGCCCUGAACAUCCUGCUGGGCCUGAAGGGCCUGG |
| | CCCCUGCCGAGAUCAGCGCCGUGUGCGAGAAGGGCAACUUCAGCGUGGCCCACGGCCUGGCCUGGAGCUA |
| | CUACAUCGGCUACCUGAGACUGAUCCUGCCUGAGCUGCAGGCCAGAAUCAGAACCUACAACCAGCACUAC |
| | AACAACCUGCUGAGAGGCGCCGUGAGCCAGAGACUGUACAUCCUGCUGCCUCUGGACUGCGGCGUGCCU |
| | GACAACCUGAGCAUGGCCGACCCUAACAUCAGAUUCCUGGACAAGCUGCCUCAGCAGACCGGCGACCACGC |
| | CGGCAUCAAGGACAGAGUGUACAGCAACAGCAUCUACGAGCUGCUGGAGAACGGCCAGAGAGCCGGCACC |
| | UGCGUGCUGGAGUACGCCACCCCUCUGCAGACCCUGUUCGCCAUGAGCCAGUACAGCCAGGCCGGCUUCA |
| | GCAGAGAGGACAGACUGGAGCAGGCCAAGCUGUUCUGCAGAACCCUGGAGGACAUCCUGGCCGACGCCCC |
| | UGAGAGCCAGAACAACUGCAGACUGAUCGCCUACCAGGAGCCUGCCGACGACAGCAGCUUCAGCCUGAGC |
| | CAGGAGGUGCUGAGACACCUGAGACAGGAGGAGAAGGAGGAGGUGACCGUGGGCAGCCUGAAGACCAGC |
| | GCCGUGCCUAGCACCAGCACCAUGAGCCAGGAGCCUGAGCUGCUGAUCAGCGGCAUGGAGAAGCCUCUGC |
| | CUCUGAGAACCGACUUCAGC |
| | (Hu STING(N154S); no epitope tag; nucleotide sequence) |
| 1446 | AUGCCUCACAGCAGCCUGCACCCUAGCAUCCCUUGCCCUAGAGGCCACGGCGCCCAGAAGGCCGCCCUGGU |
| | GCUGCUGAGCGCCUGCCUGGUGACCCUGUGGGGCCUGGGCGAGCCUCCUGAGCACACCCUGAGAUACCU |
| | GGUGCUGCACCUGGCCAGCCUGCAGCUGGGCCUGCUGCUGAACGGCGUGUGCAGCCUGGCCGAGGAGCU |
| | GAGACACAUCCACAGCAGAUACAGAGGCAGCUACUGGAGAACCGUGAGAGCCUGCCUGGGCUGCCCUCUG |
| | AGAAGAGGCGCCCUGCUGCUGCUGAGCAUCUACUUCUACUACAGCCUGCCUAACGCCGUGGGCCCUCCUU |
| | UCACCUGGAUGCUGGCCCUGCUGGGCCUGAGCCAGGCCCUGAACAUCCUGCUGGGCCUGAAGGGCCUGG |
| | CCCCUGCCGAGAUCAGCGCCCUGUGCGAGAAGGGCAACUUCAACGUGGCCCACGGCCUGGCCUGGAGCUA |
| | CUACAUCGGCUACCUGAGACUGAUCCUGCCUGAGCUGCAGGCCAGAAUCAGAACCUACAACCAGCACUAC |
| | AACAACCUGCUGAGAGGCGCCGUGAGCCAGAGACUGUACAUCCUGCUGCCUCUGGACUGCGGCGUGCCU |
| | GACAACCUGAGCAUGGCCGACCCUAACAUCAGAUUCCUGGACAAGCUGCCUCAGCAGACCGGCGACCACGC |
| | CGGCAUCAAGGACAGAGUGUACAGCAACAGCAUCUACGAGCUGCUGGAGAACGGCCAGAGAGCCGGCACC |
| | UGCGUGCUGGAGUACGCCACCCCUCUGCAGACCCUGUUCGCCAUGAGCCAGUACAGCCAGGCCGGCUUCA |
| | GCAGAGAGGACAGACUGGAGCAGGCCAAGCUGUUCUGCAGAACCCUGGAGGACAUCCUGGCCGACGCCCC |
| | UGAGAGCCAGAACAACUGCAGACUGAUCGCCUACCAGGAGCCUGCCGACGACAGCAGCUUCAGCCUGAGC |
| | CAGGAGGUGCUGAGACACCUGAGACAGGAGGAGAAGGAGGAGGUGACCGUGGGCAGCCUGAAGACCAGC |
| | GCCGUGCCUAGCACCAGCACCAUGAGCCAGGAGCCUGAGCUGCUGAUCAGCGGCAUGGAGAAGCCUCUGC |
| | CUCUGAGAACCGACUUCAGC |
| | (Hu STING(V147L); no epitope tag; nucleotide sequence) |
| 1447 | AUGCCUCACAGCAGCCUGCACCCUAGCAUCCCUUGCCCUAGAGGCCACGGCGCCCAGAAGGCCGCCCUGGU |
| | GCUGCUGAGCGCCUGCCUGGUGACCCUGUGGGGCCUGGGCGAGCCUCCUGAGCACACCCUGAGAUACCU |
| | GGUGCUGCACCUGGCCAGCCUGCAGCUGGGCCUGCUGCUGAACGGCGUGUGCAGCCUGGCCGAGGAGCU |
| | GAGACACAUCCACAGCAGAUACAGAGGCAGCUACUGGAGAACCGUGAGAGCCUGCCUGGGCUGCCCUCUG |
| | AGAAGAGGCGCCCUGCUGCUGCUGAGCAUCUACUUCUACUACAGCCUGCCUAACGCCGUGGGCCCUCCUU |
| | UCACCUGGAUGCUGGCCCUGCUGGGCCUGAGCCAGGCCCUGAACAUCCUGCUGGGCCUGAAGGGCCUGG |
| | CCCCUGCCGAGAUCAGCGCCGUGUGCGAGAAGGGCAACUUCAACGUGGCCCACGGCCUGGCCUGGAGCUA |
| | CUACAUCGGCUACCUGAGACUGAUCCUGCCUGAGCUGCAGGCCAGAAUCAGAACCUACAACCAGCACUAC |
| | AACAACCUGCUGAGAGGCGCCGUGAGCCAGAGACUGUACAUCCUGCUGCCUCUGGACUGCGGCGUGCCU |
| | GACAACCUGAGCAUGGCCGACCCUAACAUCAGAUUCCUGGACAAGCUGCCUCAGCAGACCGGCGACCACGC |
| | CGGCAUCAAGGACAGAGUGUACAGCAACAGCAUCUACGAGCUGCUGGAGAACGGCCAGAGAGCCGGCACC |
| | UGCGUGCUGGAGUACGCCACCCCUCUGCAGACCCUGUUCGCCAUGAGCCAGUACAGCCAGGCCGGCUUCA |
| | GCAGAGAGGACAGACUGGAGCAGGCCAAGCUGUUCUGCAGAACCCUGGAGGACAUCCUGGCCGACGCCCC |
| | UGAGAGCCAGAACAACUGCAGACUGAUCGCCUACCAGCAGCCUGCCGACGACAGCAGCUUCAGCCUGAGC |
| | CAGGAGGUGCUGAGACACCUGAGACAGGAGGAGAAGGAGGAGGUGACCGUGGGCAGCCUGAAGACCAGC |
| | GCCGUGCCUAGCACCAGCACCAUGAGCCAGGAGCCUGAGCUGCUGAUCAGCGGCAUGGAGAAGCCUCUGC |
| | CUCUGAGAACCGACUUCAGC |
| | (Hu STING (E315Q); no epitope tag; nucleotide sequence) |
| 1448 | AUGCCUCACAGCAGCCUGCACCCUAGCAUCCCUUGCCCUAGAGGCCACGGCGCCCAGAAGGCCGCCCUGGU |
| | GCUGCUGAGCGCCUGCCUGGUGACCCUGUGGGGCCUGGGCGAGCCUCCUGAGCACACCCUGAGAUACCU |
| | GGUGCUGCACCUGGCCAGCCUGCAGCUGGGCCUGCUGCUGAACGGCGUGUGCAGCCUGGCCGAGGAGCU |
| | GAGACACAUCCACAGCAGAUACAGAGGCAGCUACUGGAGAACCGUGAGAGCCUGCCUGGGCUGCCCUCUG |
| | AGAAGAGGCGCCCUGCUGCUGCUGAGCAUCUACUUCUACUACAGCCUGCCUAACGCCGUGGGCCCUCCUU |
| | UCACCUGGAUGCUGGCCCUGCUGGGCCUGAGCCAGGCCCUGAACAUCCUGCUGGGCCUGAAGGGCCUGG |
| | CCCCUGCCGAGAUCAGCGCCGUGUGCGAGAAGGGCAACUUCAACGUGGCCCACGGCCUGGCCUGGAGCUA |
| | CUACAUCGGCUACCUGAGACUGAUCCUGCCUGAGCUGCAGGCCAGAAUCAGAACCUACAACCAGCACUAC |
| | AACAACCUGCUGAGAGGCGCCGUGAGCCAGAGACUGUACAUCCUGCUGCCUCUGGACUGCGGCGUGCCU |
| | GACAACCUGAGCAUGGCCGACCCUAACAUCAGAUUCCUGGACAAGCUGCCUCAGCAGACCGGCGACCACGC |
| | CGGCAUCAAGGACAGAGUGUACAGCAACAGCAUCUACGAGCUGCUGGAGAACGGCCAGAGAGCCGGCACC |
| | UGCGUGCUGGAGUACGCCACCCCUCUGCAGACCCUGUUCGCCAUGAGCCAGUACAGCCAGGCCGGCUUCA |
| | GCAGAGAGGACAGACUGGAGCAGGCCAAGCUGUUCUGCAGAACCCUGGAGGACAUCCUGGCCGACGCCCC |
| | UGAGAGCCAGAACAACUGCAGACUGAUCGCCUACCAGGAGCCUGCCGACGACAGCAGCUUCAGCCUGAGC |
| | CAGGAGGUGCUGAGACACCUGAGACAGGAGGAGAAGGAGGAGGUGACCGUGGGCAGCCUGAAGACCAGC |
| | GCCGUGCCUAGCACCAGCACCAUGAGCCAGGAGCCUGAGCUGCUGAUCAGCGGCAUGGAGAAGCCUCUGC |
| | CUCUGGCCACCGACUUCAGC |
| | (Hu STING (R375A); no epitope tag; nucleotide sequence) |
| 1449 | AUGCCUCACAGCAGCCUGCACCCUAGCAUCCCUUGCCCUAGAGGCCACGGCGCCCAGAAGGCCGCCCUGGU |
| | GCUGCUGAGCGCCUGCCUGGUGACCCUGUGGGGCCUGGGCGAGCCUCCUGAGCACACCCUGAGAUACCU |
| | GGUGCUGCACCUGGCCAGCCUGCAGCUGGGCCUGCUGCUGAACGGCGUGUGCAGCCUGGCCGAGGAGCU |
| | GAGACACAUCCACAGCAGAUACAGAGGCAGCUACUGGAGAACCGUGAGAGCCUGCCUGGGCUGCCCUCUG |
| | AGAAGAGGCGCCCUGCUGCUGCUGAGCAUCUACUUCUACUACAGCCUGCCUAACGCCGUGGGCCCUCCUU |
| | UCACCUGGAUGCUGGCCCUGCUGGGCCUGAGCCAGGCCCUGAACAUCCUGCUGGGCCUGAAGGGCCUGG |
| | CCCCUGCCGAGAUCAGCGCCCUGUGCGAGAAGGGCAACUUCAGCAUGGCCCACGGCCUGGCCUGGAGCUA |
| | CUACAUCGGCUACCUGAGACUGAUCCUGCCUGAGCUGCAGGCCAGAAUCAGAACCUACAACCAGCACUAC |
| | AACAACCUGCUGAGAGGCGCCGUGAGCCAGAGACUGUACAUCCUGCUGCCUCUGGACUGCGGCGUGCCU |
| | GACAACCUGAGCAUGGCCGACCCUAACAUCAGAUUCCUGGACAAGCUGCCUCAGCAGACCGGCGACCACGC |
| | CGGCAUCAAGGACAGAGUGUACAGCAACAGCAUCUACGAGCUGCUGGAGAACGGCCAGAGAGCCGGCACC |
| | UGCGUGCUGGAGUACGCCACCCCUCUGCAGACCCUGUUCGCCAUGAGCCAGUACAGCCAGGCCGGCUUCA |
| | GCAGAGAGGACAGACUGGAGCAGGCCAAGCUGUUCUGCAGAACCCUGGAGGACAUCCUGGCCGACGCCCC |
| | UGAGAGCCAGAACAACUGCAGACUGAUCGCCUACCAGGAGCCUGCCGACGACAGCAGCUUCAGCCUGAGC |
| | CAGGAGGUGCUGAGACACCUGAGACAGGAGGAGAAGGAGGAGGUGACCGUGGGCAGCCUGAAGACCAGC |
| | GCCGUGCCUAGCACCAGCACCAUGAGCCAGGAGCCUGAGCUGCUGAUCAGCGGCAUGGAGAAGCCUCUGC |
| | CUCUGAGAACCGACUUCAGC |
| | (Hu SUING(V147L/N154S/V155M); no epiUope Uag; nucleoUide sequence) |
| 1450 | AUGCCUCACAGCAGCCUGCACCCUAGCAUCCCUUGCCCUAGAGGCCACGGCGCCCAGAAGGCCGCCCUGGU |
| | GCUGCUGAGCGCCUGCCUGGUGACCCUGUGGGGCCUGGGCGAGCCUCCUGAGCACACCCUGAGAUACCU |
| | GGUGCUGCACCUGGCCAGCCUGCAGCUGGGCCUGCUGCUGAACGGCGUGUGCAGCCUGGCCGAGGAGCU |
| | GAGACACAUCCACAGCAGAUACAGAGGCAGCUACUGGAGAACCGUGAGAGCCUGCCUGGGCUGCCCUCUG |
| | AGAAGAGGCGCCCUGCUGCUGCUGAGCAUCUACUUCUACUACAGCCUGCCUAACGCCGUGGGCCCUCCUU |
| | UCACCUGGAUGCUGGCCCUGCUGGGCCUGAGCCAGGCCCUGAACAUCCUGCUGGGCCUGAAGGGCCUGG |
| | CCCCUGCCGAGAUCAGCGCCCUGUGCGAGAAGGGCAACUUCAGCAUGGCCCACGGCCUGGCCUGGAGCUA |
| | CUACAUCGGCUACCUGAGACUGAUCCUGCCUGAGCUGCAGGCCAGAAUCAGAACCUACAACCAGCACUAC |
| | AACAACCUGCUGAGAGGCGCCGUGAGCCAGAGACUGUACAUCCUGCUGCCUCUGGACUGCGGCGUGCCU |
| | GACAACCUGAGCAUGGCCGACCCUAACAUCAGAUUCCUGGACAAGCUGCCUCAGCAGACCGGCGACCACGC |
| | CGGCAUCAAGGACAGAGUGUACAGCAACAGCAUCUACGAGCUGCUGGAGAACGGCCAGAGAGCCGGCACC |
| | UGCGUGCUGGAGUACGCCACCCCUCUGCAGACCCUGUUCGCCAUGAGCCAGUACAGCCAGGCCGGCUUCA |
| | GCAGAGAGGACAUGCUGGAGCAGGCCAAGCUGUUCUGCAGAACCCUGGAGGACAUCCUGGCCGACGCCCC |
| | UGAGAGCCAGAACAACUGCAGACUGAUCGCCUACCAGGAGCCUGCCGACGACAGCAGCUUCAGCCUGAGC |
| | CAGGAGGUGCUGAGACACCUGAGACAGGAGGAGAAGGAGGAGGUGACCGUGGGCAGCCUGAAGACCAGC |
| | GCCGUGCCUAGCACCAGCACCAUGAGCCAGGAGCCUGAGCUGCUGAUCAGCGGCAUGGAGAAGCCUCUGC |
| | CUCUGAGAACCGACUUCAGC |
| | (Hu STING(R284M/V147L/N154S/V155M); no epitope tag; nucleotide sequence) |
| 1451 | UGAUAAUAGGCUGGAGCCUCGGUGGCCUAGCUUCUUGCCCCUUGGGCCUCCCCCCAGCCCCUCCUCCCCU |
| | UCCUGCACCCGUACCCCCCAAACACCAUUGUCACACUCCAGUGGUCUUUGAAUAAAGUCUGAGUGGGCGG |
| | C |
| | (3′ UTR used in STING V155M construct, containing miR122 binding site) |
| 1452 | AUGGAGACCCCCAAGCCUAGAAUCCUGCCCUGGCUGGUGAGCCAGCUGGACCUGGGCCAGCUGGAGGGCG |
| | UAGCCUGGCUGGACGAGAGCAGAACCAGAUUCAGAAUCCCCUGGAAGCACGGCCUGAGACAAGACGCCCA |
| | GAUGGCCGACUUCGGCAUCUUCCAGGCCUGGGCCGAGGCCAGCGGCGCCUACACCCCUGGCAAGGAUAAG |
| | CCCGAUGUGAGCACCUGGAAGAGAAACUUCAGAAGCGCCCUGAACAGAAAGGAGGUGCUGAGACUGGCC |
| | GCCGACAAUAGCAAGGACCCCUACGACCCCCACAAGGUGUACGAGUUCGUUACCCCCGGCGCCAGGGACU |
| | UCGUGCACCUGGGCGCCAGCCCCGACACCAACGGCAAGAGCAGCCUGCCCCACAGCCAGGAGAACCUGCCC |
| | AAGCUGUUCGAUGGCCUGAUCCUGGGCCCCCUGAAGGACGAGGGCAGCAGCGACCUGGCCAUCGUGAGC |
| | GACCCUAGCCAGCAGCUGCCCUCCCCCAACGUGAACAACUUCCUGAACCCCGCCCCCCAGGAGAACCCCCUG |
| | AAGCAACUGCUGGCCGAGGAGCAGUGGGAGUUCGAGGUGACCGCCUUCUACAGAGGCAGACAGGUGUUC |
| | CAGCAGACCCUGUUCUGCCCCGGCGGCCUGAGACUGGUAGGCAGCACCGCUGACAUGACCCUGCCCUGGC |
| | AGCCCGUGACCCUGCCCGACCCCGAAGGCUUUCUGACCGACAAGCUGGUGAAGGAGUACGUCGGCCAAGU |
| | GCUGAAGGGCCUGGGCAACGGCCUGGCCCUGUGGCAGGCCGGCCAGUGCCUGUGGGCCCAGAGACUCGG |
| | CCACAGCCACGCCUUCUGGGCCCUGGGCGAGGAACUCCUGCCCGAUAGCGGCAGAGGCCCCGACGGCGAG |
| | GUGCACAAGGACAAGGACGGCGCCGUGUUCGACCUGCGCCCCUUCGUGGCCGACCUGAUCGCCUUCAUGG |
| | AGGGCAGCGGCCACAGCCCCAGAUAUACCCUGUGGUUCUGCAUGGGCGAGAUGUGGCCCCAGGACCAGCC |
| | CUGGGUGAAGAGACUGGUGAUGGUGAAGGUGGUGCCCACCUGCCUGAAAGAGCUGCUGGAGAUGGCCA |
| | GAGAGGGCGGCGCCAGCUCCCUGAAAACCGUGGACCUGCACAUUGACAACAGCCAGCCCAUCAGCCUGACC |
| | AGCGACCAGUACAAGGCCUACCUGCAGGACCUGGUGGAGGACAUGGACUUCCAGGCCACCGGCAACAUC |
| | (super mouse IRF3 S396D; no epitope tag) |
| 1453 | AUGGGCACCCCCAAGCCCAGAAUCCUGCCCUGGCUGGUGAGCCAGCUGGACCUGGGCCAGCUGGAGGGAG |
| | UGGCCUGGGUGAACAAGAGCAGAACCAGAUUCAGAAUCCCCUGGAAGCACGGCCUCAGACAGGACGCCCA |
| | GCAGGAGGACUUCGGCAUUUUUCAGGCUUGGGCCGAGGCCACCGGCGCCUACGUGCCCGGCAGAGACAA |
| | GCCCGACCUGCCCACCUGGAAAAGAAACUUCAGAAGCGCCUUGAAUAGAAAGGAGGGCCUGAGACUGGCC |
| | GAGGACAGAAGCAAGGACCCCCACGACCCUCACAAGAUCUACGAGUUCGUGAAUAGCGGCGUGGGCGACU |
| | UUAGCCAGCCCGACACCAGCCCCGACACCAACGGCGGCGGCAGCACCAGCGACACGCAGGAGGACAUCCUG |
| | GAUGAACUGCUGGGCAACAUGGUGCUGGCCCCCCUGCCCGAUCCCGGCCCCCCUUCGCUUGCCGUGGCCC |
| | CCGAGCCCUGCCCCCAGCCCCUGAGAAGCCCCUCUCUGGAUAACCCCACCCCCUUCCCCAACCUGGGCCCCA |
| | GCGAGAAUCCACUGAAGAGACUUCUGGUCCCCGGCGAGGAGUGGGAGUUCGAGGUGACCGCCUUCUACA |
| | GAGGCAGACAGGUGUUCCAGCAGACCAUCAGCUGCCCCGAAGGCCUGAGAUUAGUGGGCAGCGAAGUGG |
| | GCGACAGGACCCUGCCCGGGUGGCCCGUGACCCUGCCCGAUCCCGGCAUGAGCCUGACCGACAGAGGUGU |
| | GAUGAGCUACGUGAGACACGUGCUGAGCUGCCUGGGCGGCGGCCUGGCACUGUGGAGAGCCGGCCAGUG |
| | GCUGUGGGCCCAGAGACUGGGCCACUGCCACACCUACUGGGCCGUGAGCGAGGAGCUGCUGCCCAACAGC |
| | GGCCACGGCCCCGACGGCGAGGUGCCCAAGGACAAGGAAGGGGGCGUGUUCGACCUGGGCCCCUUCAUCG |
| | UAGACCUGAUCACCUUUACCGAGGGCAGCGGCAGGAGCCCCAGAUACGCCCUGUGGUUCUGCGUGGGCG |
| | AAAGCUGGCCCCAGGACCAGCCCUGGACCAAGAGACUGGUGAUGGUGAAGGUAGUGCCCACCUGCCUGAG |
| | AGCCUUAGUGGAGAUGGCCAGAGUGGGCGGGGCCAGCAGCCUGGAGAACACCGUGGAUCUUCACAUCGA |
| | CAACAGCCACCCCCUGAGCCUGACCAGCGACCAGUACAAGGCCUACCUGCAGGACCUGGUGGAGGGCAUG |
| | GACUUCCAGGGCCCCGGCGAGACC |
| | (super human IRF3 S396D; no epitope tag) |
| 1454 | AUGGCGCUGGCCCCCGAAAGAGCCGCCCCCAGAGUCCUCUUCGGCGAAUGGCUCCUUGGCGAAAUUUCGU |
| | CGGGCUGCUACGAGGGCUUACAAUGGCUGGAUGAGGCGAGAACCUGUUUCAGGGUGCCCUGGAAACACU |
| | UCGCCAGAAAGGAUCUAAGCGAAGCAGAUGCUAGAAUUUUUAAGGCUUGGGCCGUGGCCAGGGGAAGA |
| | UGGCCCCCCUCGAGCAGAGGCGGCGGCCCUCCCCCCGAGGCAGAAACGGCCGAGAGAGCCGGAUGGAAAA |
| | CCAAUUUCAGAUGCGCCCUGAGAUCUACAAGAAGAUUCGUGAUGCUUAGAGACAACAGCGGAGAUCCCG |
| | CCGAUCCCCAUAAGGUGUAUGCCCUGUCCCGGGAGCUGUGCUGGAGGGAAGGGCCUGGCACUGACCAGA |
| | CCGAAGCCGAAGCCCCCGCGGCCGUGCCGCCGCCCCAAGGAGGCCCACCAGGCCCUUUCCUCGCUCACACCC |
| | ACGCCGGUCUGCAAGCCCCGGGACCUCUACCUGCCCCUGCCGGCGAUAAAGGCGACCUGUUGCUGCAGGC |
| | CGUCCAACAGAGCUGCCUGGCCGAUCAUCUGCUCACAGCCAGCUGGGGCGCUGACCCCGUCCCAACAAAG |
| | GCCCCCGGUGAGGGCCAAGAAGGCCUGCCUCUGACCGGCGCCUGUGCCGGCGGCCCUGGCCUGCCUGCUG |
| | GCGAGCUGUACGGAUGGGCUGUCGAAACCACUCCCUCCCCCGGCCCCCAACCUGCGGCCCUGACAACCGGC |
| | GAGGCAGCCGCACCCGAAAGCCCCCACCAGGCCGAACCCUACCUCAGUCCCAGCCCCUCCGCCUGCACCGCU |
| | GUGCAGGAGCCCAGCCCCGGUGCUCUGGACGUAACAAUCAUGUACAAAGGCAGAACCGUGCUUCAGAAGG |
| | UGGUUGGACACCCCUCCUGUACUUUUCUCUACGGCCCCCCCGACCCUGCCGUGAGAGCUACCGACCCGCA |
| | ACAGGUGGCCUUUCCCUCGCCCGCCGAACUGCCCGAUCAAAAACAGCUGAGAUACACCGAGGAGCUGCUG |
| | AGACACGUGGCGCCGGGCUUACACCUAGAGUUGAGAGGCCCCCAACUCUGGGCCAGACGCAUGGGCAAGU |
| | GUAAGGUGUACUGGGAGGUCGGGGGCCCUCCCGGCUCUGCCAGCCCCAGCACCCCUGCUUGUCUCUUGCC |
| | CAGAAACUGUGAUACCCCCAUCUUCGACUUCCGUGUAUUUUUCCAGGAACUGGUCGAGUUUAGAGCCAG |
| | ACAGAGACGAGGCAGCCCCAGAUAUACAAUCUACCUCGGCUUCGGCCAGGACCUGAGUGCCGGCAGACCU |
| | AAGGAGAAGUCGCUGGUCCUAGUGAAGUUAGAGCCCUGGCUAUGUAGAGUGCACCUGGAGGGCACCCAG |
| | AGAGAAGGAGUGAGCAGCCUGGACAGCAGCAGCCUGAGUCUGUGCCUGAGCUCCGCCAACUCGCUGUAU |
| | GAUGACAUCGAGUGUUUCCUCAUGGAGCUGGAGCAGCCCGCC |
| | (Wild-type Hu IRF7 isoform A; P037 without epitope tag) |
| 1455 | AUGGCCCUUGCCCCUGAGCGGGCCGCCCCCAGAGUGUUAUUCGGCGAGUGGCUGCUGGGCGAGAUCAGC |
| | AGCGGCUGCUACGAGGGACUGCAGUGGCUGGACGAGGCUAGAACCUGCUUCAGAGUGCCCUGGAAGCAU |
| | UUCGCCAGAAAAGACCUGAGCGAGGCUGAUGCUAGAAUCUUCAAAGCCUGGGCUGUGGCCCGAGGAAGA |
| | UGGCCCCCCAGCAGCAGAGGAGGCGGCCCUCCUCCCGAGGCCGAAACCGCAGAGCGUGCUGGCUGGAAAA |
| | CCAACUUUAGGUGUGCCCUGAGGAGCACCAGAAGAUUCGUUAUGCUCAGAGACAACAGCGGGGACCCCGC |
| | CGACCCGCACAAGGUGUACGCCUUAAGUAGGGAGCUGUGCUGGAGAGAGGGACCGGGGACCGACCAAAC |
| | CGAGGCUGAGGCGCCCGCCGCCGUUCCACCUCCCCAGGGUGGUCCCCCAGGGCCCUUUCUGGCACACACCC |
| | ACGCCGGAUUACAGGCGCCAGGGCCCUUACCCGCCCCCGCCGGAGACAAAGGCGACCUCCUGCUGCAAGCC |
| | GUGCAACAAAGCUGCCUGGCCGAUCACUUACUAACCGCUAGCUGGGGCGCCGAUCCUGUUCCCACCAAGG |
| | CCCCCGGUGAAGGGCAAGAAGGACUGCCCUUAACCGGCGCCUGUGCCGGAGGCCCUGGUCUGCCAGCCGG |
| | CGAGCUGUACGGUUGGGCUGUCGAAACAACACCCAGUCCGGGCCCACAGCCUGCCGCUCUGACCACCGGC |
| | GAAGCCGCCGCCCCCGAGAGCCCACACCAGGCUGAACCCUACCUGAGCCCCAGCCCCAGCGCCUGCACCGCU |
| | GUGCAGGAGCCUAGCCCCGGCGCUCUUGAUGUGACAAUAAUGUACAAGGGCAGGACCGUGCUGCAAAAG |
| | GUCGUGGGCCAUCCGUCGUGUACCUUUCUGUACGGCCCUCCAGACCCCGCGGUUAGAGCCACCGACCCCC |
| | AGCAAGUCGCCUUCCCCUCCCCCGCCGAACUGCCCGACCAAAAGCAGCUGCGGUACACAGAAGAACUACUU |
| | AGACACGUGGCCCCCGGUCUGCACUUGGAGCUGAGAGGCCCCCAGCUCUGGGCCAGAAGAAUGGGCAAGU |
| | GCAAAGUGUACUGGGAGGUGGGCGGCCCACCCGGCUCAGCUUCGCCCUCCACACCCGCAUGCCUGCUGCC |
| | CAGAAAUUGCGACACGCCCAUCUUCGAUUUUAGAGUGUUCUUUCAGGAGUUGGUGGAGUUCAGAGCCA |
| | GACAAAGACGCGGCAGCCCCAGAUACACCAUUUACCUCGGCUUCGGCCAGGACCUCAGCGCUGGCAGACCC |
| | AAGGAGAAGAGUCUGGUCCUCGUGAAGCUGGAGCCCUGGCUGUGCAGAGUGCACCUGGAGGGCACCCAG |
| | CGUGAAGGCGUGAGCAGCCUGGAUUCAAGCGACCUGGACCUAUGCCUAAGCAGCGCUAACUCACUGUAC |
| | GACGAUAUCGAAUGCUUCCUGAUGGAACUGGAGCAGCCUGCC |
| | (constitutively active Hu IRF7 S477D/S479D; P033 without epitope tag) |
| 1456 | AUGGCCCUGGCACCCGAGAGGGCCGCCCCCAGGGUGCUCUUCGGCGAGUGGUUACUAGGCGAAAUUAGC |
| | AGCGGCUGCUAUGAAGGCCUUCAGUGGCUGGACGAGGCCAGAACCUGCUUUAGAGUUCCCUGGAAGCAC |
| | UUCGCCCGGAAAGAUCUCUCUGAAGCCGACGCCAGAAUAUUCAAGGCCUGGGCUGUCGCCAGGGGCAGG |
| | UGGCCACCCUCCAGCCGAGGUGGCGGCCCUCCCCCUGAGGCUGAGACUGCGGAAAGGGCGGGCUGGAAGA |
| | CCAAUUUCAGAUGCGCUCUGAGAAGCACCAGACGUUUUGUGAUGCUAAGAGACAAUAGCGGCGAUCCCG |
| | CCGACCCCCAUAAGGUAUACGCACUGAGCCGAGAGCUCUGUUGGAGAGAAGGCCCCGGCACCGACCAGAC |
| | CGAGGCUGAAGCCCCUGCAGCCGUGCCCCCCCCUCAAGGCGGGCCCCCCGGCCCCUUCCUGGCCCAUACCCA |
| | UGCAGGGUUACAAGCACCCGGGCCCUUGCCCGCCCCAGCGGGAGACAAGGGCGACCUCUUACUGCAGGCC |
| | GUGCAACAAAGUUGUCUGGCGGACCACCUGCUGACCGCAUCAUGGGGCGCGGAUCCUGUGCCCACCAAGG |
| | CACCCGGCGAAGGCCAGGAGGGCCUGCCCUUGACCGGCGCCUGCGCUGGCGGACCCGGCCUACCUGCUGG |
| | CGAACUGUAUGGCUGGGCCGUAGAGACGACUCCCAGCCCUGGCCCACAACCCGCGGCUUUGACCACCGGC |
| | GAAGCCGCCGCCCCCGAGUCUCCGCACCAGGCCGAGCCUUACCUCAGCCCAAGCCCUAGCGCCUGCACCGCC |
| | GUGCAAGAACCUAGCCCCGGAGCCCUGGAUGUGACAAUCAUGUACAAGGGUAGAACCGUACUGCAAAAG |
| | GUGGUGGGUCAUCCCAGCUGCACCUUUCUUUACGGCCCACCCGACCCUGCCGUGCGAGCCACAGACCCAC |
| | AACAGGUCGCCUUCCCAAGCCCCGCCGAACUGCCCGAUCAGAAACAGCUGAGAUAUACAGAGGAGCUUCU |
| | GCGGCACGUAGCUCCCGGCCUACAUCUCGAGCUGAGGGGCCCACAACUGUGGGCCAGACGCAUGGGCAAA |
| | UGCAAGGUCUACUGGGAAGUGGGAGGCCCCCCCGGCAGCGCAUCUCCCAGCACGCCCGCGUGCCUGCUGC |
| | CUAGAAAUUGCGACACCCCCAUCUUUGACUUCCGGGUAUUCUUUCAGGAGCUGGUAGAGUUCAGAGCCA |
| | GGCAGCGGAGGGGCUCCCCCAGAUACACAAUCUACCUGGGCUUCGGACAGGACCUGUCCGCCGGCCGCCC |
| | CAAGGAAAAGAGCCUGGUGCUGGUGAAGCUGGAGCCCUGGCUGUGUAGGGUACACCUCGAAGGCACCCA |
| | GAGAGAAGGAGUGAGCUCGCUUGAUGACAGCGAUCUGUCGGAUUGCCUUAGCAGCGCCAACAGCCUGUA |
| | UGAUGAUAUCGAGUGCUUCCUUAUGGAACUGGAGCAGCCCGCC |
| | (constitutively active Hu IRF7 S475D/S477D/L480D; P034 without epitope tag) |
| 1457 | AUGGCCCUAGCCCCCGAAAGAGCAGCUCCCAGAGUGCUGUUCGGCGAAUGGCUGCUUGGCGAGAUCAGC |
| | AGCGGCUGCUACGAAGGCCUGCAGUGGCUGGACGAAGCCCGCACCUGUUUCAGAGUGCCCUGGAAGCAC |
| | UUCGCUAGAAAGGAUUUGAGCGAGGCUGAUGCUAGAAUCUUUAAGGCUUGGGCUGUGGCAAGAGGCAG |
| | AUGGCCGCCUAGUAGCAGAGGGGGCGGACCUCCCCCCGAGGCUGAGACCGCUGAGAGAGCAGGGUGGAA |
| | AACCAACUUCAGAUGCGCGCUGAGAAGCACCCGAAGAUUCGUGAUGCUACGUGACAAUAGCGGCGACCCC |
| | GCCGACCCCCACAAAGUGUACGCCCUGUCCCGAGAACUUUGCUGGAGAGAGGGACCCGGCACCGAUCAAA |
| | CAGAGGCUGAGGCCCCGGCCGCUGUACCCCCGCCCCAAGGAGGCCCCCCAGGCCCCUUUCUGGCUCAUACA |
| | CAUGCCGGCCUGCAGGCACCCGGGCCCCUCCCGGCUCCUGCCGGCGACAAGGGCGAUCUCCUUCUCCAGGC |
| | CGUGCAGCAGAGCUGCCUGGCCGAUCACCUGCUGACCGCCUCGUGGGGCGCCGACCCCGUGCCCACCAAA |
| | GCCCCGGGUGAAGGCCAAGAGGGGCUCCCUUUAACCGGAGCAUGCGCCGGAGGCCCCGGCCUGCCAGCCG |
| | GCGAGUUAUAUGGCUGGGCUGUGGAGACCACACCCUCCCCCGGCCCUCAACCCGCUGCCCUGACCACCGG |
| | UGAGGCCGCCGCCCCCGAGAGCCCACACCAGGCCGAACCCUACCUGAGCCCUAGCCCUAGCGCCUGCACCGC |
| | CGUGCAAGAACCCAGCCCCGGAGCCCUGGAUGUGACCAUUAUGUACAAGGGCCGGACAGUGCUGCAAAAG |
| | GUUGUGGGACACCCGAGCUGCACCUUUCUGUACGGUCCGCCUGACCCCGCCGUGAGAGCCACGGACCCGC |
| | AGCAGGUGGCCUUCCCCUCACCCGCGGAGCUGCCCGACCAAAAGCAACUCAGAUACACAGAAGAACUAUU |
| | GCGUCACGUCGCGCCCGGCCUGCAUCUGGAGCUGAGAGGCCCCCAGCUCUGGGCCAGAAGGAUGGGCAAA |
| | UGCAAGGUGUACUGGGAGGUGGGAGGCCCCCCCGGCAGCGCCAGCCCCAGCACUCCCGCGUGCCUGCUGC |
| | CCAGAAAUUGCGACACUCCCAUCUUCGAUUUCAGGGUGUUCUUCCAGGAGCUGGUGGAGUUCAGAGCCA |
| | GGCAGAGAAGGGGUAGCCCCAGAUACACAAUCUAUCUAGGCUUUGGACAAGAUCUGAGCGCCGGCCGGC |
| | CUAAGGAAAAAAGCCUGGUGCUGGUAAAGCUGGAGCCGUGGCUUUGUAGAGUGCACCUGGAGGGGACG |
| | CAGCGAGAGGGCGUGAGCAGCUUAGACGACGAUGACUUGGAUCUGUGUCUCGACAGCGCCAACGACUUG |
| | UACGACGACAUCGAGUGCUUCCUGAUGGAACUGGAGCAGCCCGCC |
| | (constitutively active Hu IRF7 S475D/S476D/S477D/S479D/S483D/S487D; P035 without epitope tag) |
| 1458 | AUGGCCCUGGCCCCCGAGAGAGCCGCCCCCAGAGUGCUCUUCGGCGAGUGGCUGCUGGGCGAGAUAAGCA |
| | GCGGCUGCUACGAAGGUCUGCAGUGGCUAGACGAGGCCAGAACCUGCUUUAGAGUGCCCUGGAAGCACU |
| | UCGCUCGAAAGGACCUGUCCGAGGCCGAUGCUAGAAUUUUUAAGGCUUGGGCCGUCGCUAGGGGAAGA |
| | UGGCCCCCUAGCAGUAGAGGCGGCGGCCCCCCUCCCGAAGCCGAGACGGCCGAGAGGGCCGGCUGGAAAA |
| | CCAAUUUCAGAUGCGCCCUGAGGAGCACCCGCAGGUUCGUAAUGCUGCGAGACAAUAGCGGCGAUCCUGC |
| | GGAUCCUCACAAGGUUUACGCCUUGAGUAGAGAACUGUGCUGGCGGGAGGGCCCCGGAACCGACCAGAC |
| | GGAGGCAGAGGCACCCGCUGCCGUGCCCCCCCCUCAAGGAGGACCCCCUGGACCCUUUCUGGCCCACACCC |
| | ACGCUGGUCUGCAGGCCCCAGGCCCACUGCCCGCCCCAGCGGGCGAUAAGGGUGACCUGCUCCUACAGGC |
| | GGUGCAACAGAGCUGUCUGGCCGACCACCUGUUGACCGCCAGCUGGGGGGCCGACCCGGUGCCCACCAAA |
| | GCUCCCGGAGAGGGCCAAGAAGGCCUCCCACUAACUGGCGCCUGCGCCGGGGGCCCGGGAUUACCCGCCG |
| | GCGAGCUGUAUGGCUGGGCCGUGGAGACCACGCCCAGCCCCGAGGGCGUGUCGUCCCUGGACAGCAGCAG |
| | CCUGAGCCUGUGCCUGAGCUCCGCCAACAGCCUGUAUGACGACAUCGAGUGCUUCCUGAUGGAGCUGGA |
| | ACAACCCGCC |
| | (constitutively active truncated Hu IRF7 1-246 + 468-503; P032 without epitope tag) |
| 1459 | AUGGCACUGGCGCCUGAAAGAGCCGCUCCGCGUGUGCUCUUCGGCGAGUGGCUGCUGGGCGAGAUCAGC |
| | UCCGGCUGCUACGAGGGUCUACAGUGGCUGGACGAGGCCAGAACCUGUUUUAGAGUGCCCUGGAAGCAC |
| | UUCGCGAGAAAGGACCUGAGCGAGGCCGACGCCAGAAUCUUCAAAGCCUGGGCAGUGGCUAGGGGCAGA |
| | UGGCCUCCCAGCAGCCGGGGCGGCGGCCCACCCCCCGAGGCCGAAACCGCCGAAAGAGCUGGCUGGAAGAC |
| | CAACUUCAGAUGCGCCCUGAGAAGCACCAGAAGAUUUGUCAUGCUGAGAGAUAAUUCAGGAGACCCCGCC |
| | GACCCUCACAAGGUGUACGCCCUGUCCAGAGAGCUGUGUUGGAGAGAGGGCCCCGGAACCGACCAGACCG |
| | AGGCCGAGGCUCCAGCUGCCGUGCCACCCCCCCAAGGCGGACCACCCGGCCCCUUCUUGGCACAUACGCAC |
| | GCCGGCCUCCAGGCUCCCGGCCCUCUGCCCGCCCCUGCUGGUGACAAAGGCGAUCUGCUGCUGCAAGCCG |
| | UCCAGCAAUCCUGCUUGGCUGACCACCUGCUGACCGCUAGCUGGGGAGCCGACCCCGUUCCCACCAAGGC |
| | UCCCGGAGAAGGACAGGAGGGCCUGCCCCUUACCGGCGCUUGCGCGGGGGGCCCUGGCUUGCCUGCCGG |
| | CGAACUGUACGGCUGGGCCGUGGAGACCACGCCUUCCCCCGAGGGCGUGUCCAGCCUGGACGAUGAUGAC |
| | CUGGAUCUGUGCCUGGACAGCGCCAACGACCUGUACGAUGACAUCGAGUGCUUUUUGAUGGAGCUGGAG |
| | CAGCCCGCC |
| | (constitutively active truncated Hu IRF7 1-246 + 468-503 plus |
| | S475D/S476D/S477D/S479D/S483D/S487D; P036 without epitope tag) |
| 1460 | AUGGCCCUGGCCCCCGAGAGAGCCGCGCCCAGAGUGCUGUUCGGCGAAUGGCUGCUGGGCGAGAUCAGC |
| | AGCGGCUGCUAUGAGGGCCUGCAGUGGCUCGACGAAGCCAGGACGUGCUUCAGAGUCCCCUGGAAGCAC |
| | UUCGCCAGAAAGGAUCUGAGCGAGGCUGACGCCAGAAUCUUCAAGGCCUGGGCAGUUGCGCGUGGGAGA |
| | UGGCCCCCCAGCUCGCGGGGCGGCGGUCCCCCCCCUGAGGCCGAGACCGCCGAAAGAGCCGGAUGGAAAAC |
| | CAACUUUCGAUGCGCCCUCAGAAGCACCAGACGGUUUGUGAUGCUGAGAGAUAACAGCGGCGACCCUGCA |
| | GACCCCCAUAAAGUGUAUGCCCUGAGCAGAGAGCUGUGUUGGCGAGAGGGCCCCGGAACCGACCAAACCG |
| | AGGCCGAGGCCCCCGCCGCCGUACCCCCCCCUCAAGGCCCCCAGCCUGCUGCUCUGACCACGGGAGAAGCC |
| | GCCGCUCCUGAGAGCCCCCACCAAGCCGAGCCCUAUCUGAGCCCUAGCCCCAGCGCCUGCACCGCCGUGCA |
| | GGAGCCCUCACCGGGCGCCCUAGACGUGACCAUCAUGUACAAGGGGCGCACGGUGCUGCAAAAGGUGGU |
| | GGGCCACCCCAGCUGCACCUUCCUGUACGGCCCCCCCGACCCUGCCGUGAGAGCCACCGACCCCCAGCAAG |
| | UCGCCUUCCCCAGCCCCGCCGAGCUGCCCGACCAGAAGCAGCUGAGGUACACCGAGGAGUUGCUGAGACA |
| | UGUGGCCCCCGGCUUGCACCUCGAGCUGAGAGGCCCGCAGCUCUGGGCCAGAAGAAUGGGCAAGUGCAA |
| | GGUGUACUGGGAGGUGGGCGGCCCCCCCGGCAGCGCGAGCCCAAGCACCCCGGCCUGCCUGCUGCCUAGA |
| | AACUGCGACACCCCUAUCUUCGACUUCAGAGUAUUUUUCCAGGAGCUGGUCGAGUUCAGGGCCAGACAG |
| | CGUAGAGGCAGCCCCAGAUACACCAUCUACCUUGGAUUCGGCCAGGACCUGAGCGCCGGCAGACCCAAAG |
| | AGAAGUCCCUGGUACUGGUGAAGCUAGAGCCCUGGCUGUGUAGGGUGCAUCUGGAAGGCACCCAAAGAG |
| | AGGGCGUAAGCUCGCUUGACAGCAGCAGCCUCAGCCUGUGCCUGAGCAGCGCUAACAGCUUAUACGACGA |
| | CAUCGAGUGCUUCCUGAUGGAGCUGGAACAACCCGCC |
| | (truncated Hu IRF7 1-151 + 247-503; P038 without epitope tag; null mutation) |
| 1461 | AUGGGCGGCCCUCCCGGGCCUUUCCUGGCCCAUACACACGCCGGCCUACAGGCUCCUGGCCCUCUGCCCGC |
| | CCCGGCCGGCGACAAGGGCGACCUCCUGCUGCAGGCCGUGCAGCAGUCCUGUCUGGCCGACCACCUGCUG |
| | ACUGCUAGCUGGGGCGCCGAUCCCGUGCCCACCAAGGCCCCAGGAGAGGGGCAAGAGGGCCUGCCUCUAA |
| | CCGGCGCAUGCGCAGGUGGACCAGGCCUCCCCGCCGGCGAGCUGUAUGGUUGGGCCGUGGAGACAACCCC |
| | CAGCCCCGGCCCGCAGCCUGCUGCGCUGACCACAGGCGAGGCCGCUGCCCCUGAGAGCCCCCACCAAGCUG |
| | AACCCUACCUGAGCCCCAGCCCCUCUGCCUGCACAGCGGUGCAGGAGCCCAGUCCCGGCGCCUUGGACGUG |
| | ACCAUCAUGUAUAAGGGCAGGACUGUGUUACAAAAGGUAGUGGGCCACCCAAGUUGUACCUUUCUGUAC |
| | GGGCCCCCCGACCCAGCCGUGCGCGCCACCGACCCCCAGCAGGUGGCCUUCCCCAGCCCCGCUGAGUUGCC |
| | CGAUCAGAAACAACUCCGGUACACCGAGGAAUUACUUAGACAUGUGGCUCCCGGCCUGCAUCUGGAGCUU |
| | AGAGGUCCACAGUUGUGGGCCAGAAGAAUGGGCAAGUGCAAGGUUUAUUGGGAGGUCGGAGGCCCCCC |
| | GGGCAGCGCCAGCCCCAGCACCCCCGCCUGUCUUCUGCCCAGAAACUGCGACACCCCAAUCUUCGAUUUCA |
| | GAGUGUUUUUCCAGGAACUGGUGGAGUUCAGAGCAAGGCAAAGAAGAGGCAGCCCUAGAUACACCAUCU |
| | ACCUGGGCUUUGGCCAAGACCUGAGCGCCGGCAGACCCAAGGAAAAAUCCCUGGUCCUGGUGAAACUGGA |
| | GCCCUGGCUGUGCAGAGUCCACCUGGAGGGCACCCAGAGAGAGGGCGUGAGCAGCCUGGACUCGAGCAG |
| | CCUGUCCCUGUGUCUGAGCAGCGCGAAUUCGCUAUAUGACGACAUCGAAUGCUUUCUGAUGGAGCUGGA |
| | ACAGCCCGCC |
| | (truncated Hu IRF7 152-503; P039 without epitope tag; null mutation) |
| 1462 | AUGCCUCACAGCAGCCUCCACCCUAGCAUCCCUUGCCCUAGAGGCCACGGCGCCCAGAAGGCCGCCCUCGU |
| | GCUUUUAAGCGCCUGCUUGGUGACCCUUUGGGGCUUGGGCGAGCCUCCAGAGCACACCUUGAGAUAUUU |
| | GGUGCUCCACCUGGCCAGCCUUCAGCUGGGCUUGUUACUCAACGGCGUGUGCAGCCUGGCCGAGGAGCU |
| | GAGACACAUCCACAGCAGAUACAGAGGCAGCUACUGGAGAACCGUGAGAGCGUGUCUGGGCUGCCCUCU |
| | GAGAAGAGGCGCCUUGCUUCUUCUCAGUAUCUACUUCUACUACUCCCUGCCUAACGCCGUGGGCCCUCCU |
| | UUCACCUGGAUGCUGGCACUGCUCGGCCUCAGCCAGGCCCUGAACAUCUUGUUGGGCUUGAAGGGCCUG |
| | GCCCCUGCCGAGAUCAGCGCCGUGUGCGAGAAGGGCAACUUCAACAUGGCCCACGGAUUGGCUUGGAGC |
| | UACUACAUCGGCUACCUGAGACUGAUCCUGCCUGAGCUGCAGGCCAGAAUCAGAACCUACAACCAGCACU |
| | ACAACAACCUGCUGCGCGGCGCAGUGAGCCAGAGACUGUAUAUUCUGCUGCCUCUGGACUGCGGCGUGC |
| | CUGACAACCUGAGCAUGGCCGACCCUAACAUCAGAUUCCUGGACAAGCUGCCUCAGCAGACCGGCGACCAC |
| | GCCGGCAUCAAGGACAGAGUGUACAGCAACAGCAUCUAUGAGCUGCUCGAGAAUGGCCAGAGAGCCGGCA |
| | CCUGCGUGCUGGAGUACGCCACCCCUCUGCAGACCCUGUUCGCCAUGAGCCAGUAUAGUCAAGCUGGCUU |
| | CAGCAGAGAGGACAGACUGGAGCAGGCCAAGCUGUUCUGCAGAACCCUGGAGGACAUUCUGGCUGACGC |
| | CCCUGAGAGCCAGAACAACUGCCGACUGAUCGCCUACCAGGAACCAGCCGACGACAGCAGCUUCAGUCUU |
| | UCUCAGGAGGUUCUUCGCCACUUGCGCCAGGAGGAGAAGGAGGAGGUGACCGUGGGCAGCCUGAAGACC |
| | UCCGCAGUCCCUAGCACCAGCACCAUGAGUCAGGAGCCGGAGCUAUUAAUCAGCGGCAUGGAGAAGCCUC |
| | UUCCACUCCGAACCGACUUCAGCGCCACCAACUUCAGCCUGCUGAAGCAGGCAGGUGACGUUGAGGAGAA |
| | UCCGGGACCUAUGACCGAGUACAAGCUGGUGGUUGUGGGCGCCGACGGCGUGGGCAAGAGCGCCCUGAC |
| | CAUCCAGCUGAUCCAG |
| | (KRAS(G12D)25 mer_nt.STING(V155M)) |
| 1463 | AUGACCGAGUACAAGCUAGUAGUCGUGGGCGCCGACGGCGUGGGCAAGAGCGCCCUCACCAUCCAGCUAA |
| | UCCAGGCCACCAACUUCAGCUUGCUCAAGCAGGCCGGCGACGUGGAGGAGAACCCAGGCCCUAUGCCUCA |
| | CAGCAGCCUUCACCCUAGCAUCCCUUGCCCUAGAGGCCACGGCGCCCAGAAGGCCGCCCUGGUGCUGCUG |
| | AGCGCCUGCCUGGUGACCCUGUGGGGCCUGGGCGAGCCUCCUGAGCACACCCUGAGAUAUCUGGUGCUU |
| | CACCUGGCCAGUUUACAGCUGGGCCUGCUUCUUAACGGCGUGUGCAGCCUGGCCGAGGAGCUGAGACAC |
| | AUCCACAGCAGAUACAGAGGCAGCUACUGGAGAACCGUGAGAGCCUGCCUAGGCUGCCCUCUGAGAAGAG |
| | GCGCUCUGUUGCUACUUUCCAUCUACUUCUACUACUCCCUGCCUAACGCCGUGGGCCCUCCUUUCACUUG |
| | GAUGCUGGCGUUGCUGGGUCUGAGCCAGGCCCUGAACAUCCUUCUCGGUCUGAAGGGCCUGGCCCCUGC |
| | CGAGAUCAGCGCCGUGUGCGAGAAGGGCAACUUCAACAUGGCCCACGGACUCGCCUGGAGCUACUACAUC |
| | GGCUACCUGAGACUGAUCCUGCCUGAGCUGCAGGCCAGAAUCAGAACCUACAACCAGCACUACAACAACCU |
| | GCUGCGGGGCGCCGUGAGCCAGAGACUGUAUAUACUUCUUCCUCUGGACUGCGGCGUGCCUGACAACCU |
| | GAGCAUGGCCGACCCUAACAUCAGAUUCCUGGACAAGCUGCCUCAGCAGACCGGCGACCACGCCGGCAUCA |
| | AGGACAGAGUGUACAGCAACUCCAUUUAUGAGCUGCUCGAGAAUGGCCAGAGAGCCGGCACCUGCGUGC |
| | UGGAGUACGCCACCCCUCUGCAGACCCUGUUCGCCAUGAGCCAGUACAGUCAGGCUGGAUUCAGCAGAGA |
| | GGACAGACUGGAGCAGGCCAAGCUGUUCUGCAGGACACUGGAGGACAUACUAGCAGACGCCCCUGAGAGC |
| | CAGAACAACUGCAGACUGAUUGCCUACCAGGAGCCUGCGGACGACAGCUCCUUCAGUCUGAGUCAGGAGG |
| | UGUUGCGGCACUUACGCCAAGAAGAGAAGGAGGAGGUGACCGUGGGCAGCCUGAAGACUAGCGCUGUGC |
| | CUAGCACCAGCACAAUGUCACAGGAGCCGGAAUUGCUAAUCAGCGGCAUGGAGAAGCCUCUCCCAUUACG |
| | UACCGACUUCAGC |
| | (KRAS(G12D)25 mer_ct.STING(V155M)) |
| 1464 | AUGCCUCACAGCAGCCUUCACCCUAGCAUCCCUUGCCCUAGAGGCCACGGCGCCCAGAAGGCCGCCCUAGU |
| | GCUCCUUAGCGCCUGCCUCGUGACCCUAUGGGGCUUAGGCGAGCCUCCAGAGCACACCUUGAGAUACCUC |
| | GUCCUCCACCUGGCUAGUCUACAGCUGGGCCUUCUCCUCAACGGCGUGUGCAGCCUGGCCGAGGAGCUG |
| | AGACACAUCCACAGCAGAUACAGAGGCAGCUACUGGAGAACCGUGAGAGCGUGCCUGGGCUGCCCUCUGA |
| | GAAGAGGCGCACUGCUGUUACUCAGCAUCUACUUCUACUACUCACUGCCAAACGCCGUGGGCCCUCCUUU |
| | CACCUGGAUGCUGGCCUUGCUCGGAUUGAGCCAGGCCCUGAACAUUUUACUGGGAUUGAAGGGCCUGGC |
| | CCCUGCCGAGAUCAGCGCCGUGUGCGAGAAGGGCAACUUCAACAUGGCCCACGGCCUAGCUUGGAGCUAC |
| | UACAUCGGCUACCUGAGACUGAUCCUGCCUGAGCUGCAGGCCAGAAUCAGAACCUACAACCAGCACUACA |
| | ACAACCUGCUGCGUGGAGCGGUGAGCCAGAGACUGUAUAUCCUCCUGCCUCUGGACUGCGGAGUGCCUG |
| | ACAACCUGAGCAUGGCCGACCCUAACAUCAGAUUCCUGGACAAGCUGCCUCAGCAGACCGGCGACCACGCC |
| | GGCAUCAAGGACAGAGUGUACAGCAACUCAAUCUACGAGCUGUUGGAGAAUGGCCAGAGAGCCGGCACC |
| | UGCGUGCUGGAGUACGCCACCCCUCUGCAGACCCUGUUCGCCAUGAGCCAGUACUCUCAGGCAGGCUUCA |
| | GCAGAGAGGACAGACUGGAGCAGGCCAAGCUGUUCUGCAGAACCCUGGAGGACAUCCUGGCGGACGCCCC |
| | UGAGAGCCAGAACAACUGCCGGCUUAUCGCCUACCAGGAGCCAGCAGACGACAGCAGCUUCUCUCUCUCA |
| | CAAGAGGUACUGCGCCAUCUUCGCCAGGAGGAGAAGGAGGAGGUGACCGUGGGCAGCCUGAAGACAUCC |
| | GCCGUACCUAGCACCAGCACCAUGUCUCAGGAACCGGAACUGUUGAUCAGCGGCAUGGAGAAGCCUCUGC |
| | CACUGCGCACCGACUUCAGCGCCACCAACUUCUCCCUACUGAAGCAAGCCGGUGACGUUGAAGAGAACCCU |
| | GGCCCUAUGACCGAGUACAAGCUGGUAGUAGUAGGCGCCGACGGCGUGGGCAAGAGCGCCCUGACCAUCC |
| | AGCUGAUCCAGAUGACUGAAUAUAAGCUUGUCGUCGUGGGCGCAGAUGGCGUUGGUAAGAGCGCACUU |
| | ACAAUUCAACUCAUUCAGAUGACGGAGUAUAAGCUGGUGGUGGUCGGAGCUGACGGCGUAGGCAAGAG |
| | UGCCCUUACUAUUCAGCUAAUUCAG |
| | (KRAS(G12D)25 mer\hat{ }3_nt.STING(V155M)) |
| 1465 | AUGACCGAGUACAAGCUUGUGGUGGUUGGCGCCGACGGCGUGGGCAAGAGCGCCUUAACCAUCCAGCUU |
| | AUCCAGAUGACAGAGUAUAAGCUAGUGGUGGUCGGCGCAGACGGAGUGGGAAAGAGUGCAUUAACUAU |
| | UCAACUCAUCCAAAUGACCGAAUACAAGCUAGUAGUUGUGGGUGCAGAUGGCGUCGGCAAGUCUGCACU |
| | GACAAUUCAGCUCAUCCAGGCCACCAACUUCAGCCUGCUGAAGCAGGCCGGCGACGUGGAGGAGAACCCU |
| | GGCCCUAUGCCUCACAGCAGCCUGCACCCUAGCAUCCCUUGCCCUAGAGGCCACGGCGCCCAGAAGGCCGC |
| | CCUGGUGCUGCUGAGCGCCUGCCUGGUGACCCUGUGGGGCCUGGGCGAGCCUCCUGAGCACACCCUGAG |
| | AUACCUAGUUUUGCACCUGGCUUCUCUGCAGCUGGGCCUACUGCUCAACGGCGUGUGCAGCCUGGCCGA |
| | GGAGCUGAGACACAUCCACAGCAGAUACAGAGGCAGCUACUGGAGAACCGUGAGAGCAUGCUUAGGCUG |
| | CCCUCUGAGAAGAGGCGCUCUGCUCCUCUUGUCCAUCUACUUCUACUACUCGCUACCUAACGCCGUGGGC |
| | CCUCCUUUCACCUGGAUGCUGGCCCUCUUGGGAUUAAGCCAGGCCCUGAACAUCUUGCUGGGACUGAAG |
| | GGCCUGGCCCCUGCCGAGAUCAGCGCCGUGUGCGAGAAGGGCAACUUCAACAUGGCCCACGGACUCGCUU |
| | GGAGCUACUACAUCGGCUACCUGAGACUGAUCCUGCCUGAGCUGCAGGCCAGAAUCAGAACCUACAACCA |
| | GCACUACAACAACCUGCUGCGGGGAGCAGUGAGCCAGAGACUGUAUAUUCUGCUCCCUCUGGACUGCGG |
| | CGUGCCUGACAACCUGAGCAUGGCCGACCCUAACAUCAGAUUCCUGGACAAGCUGCCUCAGCAGACCGGC |
| | GACCACGCCGGCAUCAAGGACAGAGUGUACAGCAACAGCAUUUACGAGCUGCUGGAGAACGGCCAGAGAG |
| | CCGGCACCUGCGUGCUGGAGUACGCCACCCCUCUGCAGACCCUGUUCGCCAUGAGCCAGUACUCCCAGGC |
| | AGGAUUCAGCAGAGAGGACAGACUGGAGCAGGCCAAGCUGUUCUGCCGUACUCUUGAGGACAUCCUUGC |
| | AGACGCCCCUGAGAGCCAGAACAACUGCCGGUUGAUUGCCUACCAGGAACCGGCAGACGACAGCUCAUUC |
| | UCCUUGUCUCAGGAGGUCCUUAGACACCUGCGGCAGGAGGAGAAGGAGGAGGUGACCGUGGGCAGCCUG |
| | AAGACAUCCGCCGUGCCUAGCACGUCUACCAUGUCCCAGGAGCCGGAACUGCUAAUCAGCGGCAUGGAGA |
| | AGCCUCUGCCUCUCAGGACCGACUUCAGC |
| | (KRAS(G12D)25 mer\hat{ }3_ct.STING(V155 M)) |
| 1466 | AUGCCCCAUAGCAGCCUGCACCCCAGCAUCCCCUGCCCCAGAGGCCACGGCGCCCAGAAGGCCGCCCUGGU |
| | CCUGCUGAGCGCAUGCCUGGUCACCCUGUGGGGCCUGGGCGAGCCCCCCGAGCACACCCUGAGAUACCUG |
| | GUGCUGCACCUCGCCAGCCUGCAGCUGGGCCUGCUGCUGAACGGCGUGUGCAGCCUGGCCGAGGAGCUG |
| | AGACACAUCCACAGCAGAUAUAGAGGCAGCUACUGGAGAACCGUGAGAGCUUGCCUCGGCUGCCCCCUGA |
| | GAAGAGGCGCCCUGCUGCUGCUGAGCAUCUACUUUUACUACAGCCUGCCCAACGCUGUGGGCCCCCCUUU |
| | CACGUGGAUGCUCGCCCUGCUGGGACUGAGCCAGGCCCUGAACAUCCUGCUGGGCCUUAAGGGCCUAGCC |
| | CCCGCCGAGAUCAGCGCCGUGUGCGAGAAGGGCAACUUCAAUGUGGCCCACGGCCUGGCCUGGAGCUACU |
| | ACAUCGGCUACCUGAGACUGAUCCUGCCCGAGCUGCAGGCCAGAAUCAGAACCUACAAUCAGCACUACAAC |
| | AACCUGCUGAGAGGCGCCGUGAGCCAGAGACUGUACAUCCUGCUGCCCCUGGACUGCGGCGUGCCCGACA |
| | ACCUCAGCAUGGCCGACCCCAACAUCAGAUUCCUGGACAAGCUGCCCCAGCAGACCGGCGACCACGCCGGC |
| | AUCAAGGAUCGCGUGUACAGCAACAGCAUCUACGAGCUGCUGGAAAACGGCCAGAGAGCCGGAACCUGCG |
| | UGCUGGAGUACGCCACACCCCUGCAGACCCUGUUCGCCAUGAGCCAGUACAGCCAGGCCGGCUUCAGCAG |
| | AGAGGACAAGCUGGAGCAGGCCAAGCUGUUCUGCAGAACCCUGGAGGAUAUCCUCGCCGACGCCCCCGAG |
| | AGCCAGAACAACUGCAGGCUGAUCGCGUACCAGGAGCCCGCUGACGACAGCAGCUUUAGCCUGAGCCAGG |
| | AGGUGCUGAGACAUCUGCGUCAAGAGGAAAAGGAGGAGGUGACCGUGGGCUCCCUGAAGACCAGCGCCG |
| | UGCCCAGCACCAGCACCAUGAGCCAGGAGCCCGAGCUGCUGAUCAGCGGCAUGGAGAAGCCACUGCCCCUC |
| | AGAACCGACUUCAGCACC |
| | (Hu STING (R284K) var; no epitope tag) |
| 1467 | AUGAGAAUGAAGCAGCUGGAGGACAAGAUCGAGGAGCUGCUGAGCAAGAUCUACCACCUGGAGAACGAG |
| | AUCGCCAGACUGAAGAAGCUGAUCGGCGAGGCCGACCAGACCAGCGGCAACUACCUGAACAUGCAGGACA |
| | GCCAGGGCGUGCUGAGCAGCUUCCCCGCCCCCCAGGCCGUGCAGGACAACCCCGCCAUGCCCACCAGCAGC |
| | GGCAGCGAGGGCAACGUGAAGCUGUGCAGCCUGGAGGAGGCCCAGAGAAUCUGGAAGCAGAAGAGCGCC |
| | GAGAUCUACCCCAUCAUGGACAAGAGCAGCAGAACCAGACUGGCCCUGAUCAUCUGCAACGAGGAGUUCG |
| | ACAGCAUCCCCAGAAGAACCGGCGCCGAGGUGGACAUCACCGGCAUGACCAUGCUGCUGCAGAACCUGGG |
| | CUACAGCGUGGACGUGAAGAAGAACCUGACCGCCAGCGACAUGACCACCGAGCUGGAGGCCUUCGCCCAC |
| | AGACCCGAGCACAAGACCAGCGACAGCACCUUCCUGGUGUUCAUGAGCCACGGCAUCAGAGAGGGCAUCU |
| | GCGGCAAGAAGCACAGCGAGCAGGUGCCCGACAUCCUGCAGCUGAACGCCAUCUUCAACAUGCUGAACAC |
| | CAAGAACUGCCCCAGCCUGAAGGACAAGCCCAAGGUGAUCAUCAUCCAGGCCUGCAGAGGCGACAGCCCCG |
| | GCGUGGUGUGGUUCAAGGACAGCGUGGGCGUGAGCGGCAACCUGAGCCUGCCCACCACCGAGGAGUUCG |
| | AGGACGACGCCAUCAAGAAGGCCCACAUCGAGAAGGACUUCAUCGCCUUCUGCAGCAGCACCCCCGACAAC |
| | GUGAGCUGGAGACACCCCACCAUGGGCAGCGUGUUCAUCGGCAGACUGAUCGAGCACAUGCAGGAGUAC |
| | GCCUGCAGCUGCGACGUGGAGGAGAUCUUCAGAAAGGUGAGAUUCAGCUUCGAGCAGCCCGACGGCAGA |
| | GCCCAGAUGCCCACCACCGAGAGAGUGACCCUGACCAGAUGCUUCUACCUGUUCCCCGGCCAC |
| | DM_hsCASP1 (self-activating human Caspase 1); P2025 without epitope tag) |
| 1468 | AUGAGAAUGAAGCAGCUGGAGGACAAGAUCGAGGAGCUGCUGAGCAAGAUCUAUCACCUGGAGAACGAG |
| | AUCGCCAGACUGAAGAAGCUGAUCGGCGAGAGACAGAUCAGCCCCAACAAGAAGGCCCACCCCAACAUGGA |
| | GGCCGGACCGCCUGAGAGCGGCGAGAGCACCGACGCCCUGAAGCUGUGCCCCCACGAGGAGUUCCUGAGA |
| | CUGUGCAAGGAGAGAGCCGAGGAGAUCUACCCCAUCAAGGAGAGAAACAACAGAACCAGACUGGCCCUGA |
| | UCAUCUGCAACACCGAGUUCGACCACCUGCCCCCCAGAAACGGCGCCGACUUCGACAUCACCGGCAUGAAG |
| | GAGCUGCUGGAGGGCCUGGACUACAGCGUGGACGUGGAGGAGAACCUGACCGCCAGAGACAUGGAGAGC |
| | GCCCUGAGAGCCUUCGCCACCAGACCCGAGCACAAGAGCAGCGACAGCACCUUCCUGGUGCUGAUGAGCC |
| | ACGGCAUCCUGGAGGGCAUCUGCGGCACCGUGCACGACGAGAAGAAGCCCGACGUGCUGCUGUACGACAC |
| | CAUCUUCCAGAUCUUCAACAACAGAAACUGCCUGAGCCUGAAGGACAAGCCCAAGGUGAUCAUCGUGCAG |
| | GCCUGCAGAGGCGCCAACAGAGGCGAGCUGUGGGUGAGAGACAGCCCCGCCAGCCUGGAGGUGGCCAGCA |
| | GCCAGAGCAGCGAGAACCUGGAGGAGGACGCCGUGUACAAGACCCACGUGGAGAAGGACUUCAUCGCCUU |
| | CUGCAGCAGCACCCCCCACAACGUGAGCUGGAGAGACAGCACCAUGGGCAGCAUCUUCAUCACCCAGCUGA |
| | UAACCUGCUUCCAGAAGUACAGCUGGUGCUGCCACCUGGAGGAGGUGUUCAGAAAGGUGCAGCAGAGCU |
| | UCGAGACCCCCAGAGCCAAGGCCCAGAUGCCCACCAUCGAGAGACUGAGCAUGACCAGAUACUUCUACCUG |
| | UUCCCCGGCAAC |
| | (Caspase-4, N. del + DM domain; P2015 without epitope tag) |
| 1469 | AUGAGCGCCGAGGUGAUCCACCAGGUGGAGGAGGCCCUGGACACCGACGAGAAGGAGAUGCUGCUGUUC |
| | CUGUGCAGAGACGUGGCCAUCGACGUGGUGCCCCCCAACGUGAGAGACCUGCUGGACAUCCUGAGAGAG |
| | AGAGGCAAGCUGAGCGUGGGCGACCUGGCCGAGCUGCUGUACAGAGUGAGAAGAUUCGACCUGCUGAAG |
| | AGAAUCCUGAAGAUGGACAGAAAGGCCGUGGAGACCCACCUGCUGAGAAACCCCCACCUGGUGAGCGACU |
| | ACAGAGUGCUGAUGGCCGAGAUCGGCGAGGACCUGGACAAGAGCGACGUGAGCAGCCUGAUCUUCCUGA |
| | UGAAGGACUACAUGGGCAGAGGCAAGAUCAGCAAGGAGAAGAGCUUCCUGGACCUGGUGGUGGAGCUG |
| | GAGAAGCUGAACCUGGUGGCCCCCGACCAGCUGGACCUGCUGGAGAAGUGCCUGAAGAACAUCCACAGAA |
| | UCGACCUGAAGACCAAGAUCCAGAAGUACAAGCAGAGCGUGCAGGGCGCCGGCACCAGCUACAGAAACGU |
| | GCUGCAGGCCGCCAUCCAGAAGAGCCUGAAGGACCCCAGCAACAACUUCAGACUGCACAACGGCAGAAGCA |
| | AGGAGCAGAGACUGAAGGAGCAGCUGGGCGCCCAGCAGGAGCCCGUGAAGAAGAGCAUCCAGGAGAGCG |
| | AGGCCUUCCUGCCCCAGAGCAUCCCCGAGGAGAGAUACAAGAUGAAGAGCAAGCCCCUGGGCAUCUGCCU |
| | GAUCAUCGACUGCAUCGGCAACGAGACCGAGCUGCUGAGAGACACCUUCACCAGCCUGGGCUACGAGGUG |
| | CAGAAGUUCCUGCACCUGAGCAUGCACGGCAUCAGCCAGAUCCUGGGCCAGUUCGCCUGCAUGCCCGAGC |
| | ACAGAGACUACGACAGCUUCGUGUGCGUGCUGGUGAGCAGAGGCGGCAGCCAGAGCGUGUACGGCGUGG |
| | ACCAGACCCACAGCGGCCUGCCCCUGCACCACAUCAGAAGAAUGUUCAUGGGCGACAGCUGCCCCUACCUG |
| | GCCGGCAAGCCCAAGAUGUUCUUCAUCCAGAACUACGUGGUGAGCGAGGGCCAGCUGGAGGACAGCAGCC |
| | UGCUGGAGGUGGACGGCCCCGCCAUGAAGAACGUGGAGUUCAAGGCCCAGAAGAGAGGCCUGUGCACCG |
| | UGCACAGAGAGGCCGACUUCUUCUGGAGCCUGUGCACCGCCGACAUGAGCCUGCUGGAGCAGAGCCACAG |
| | CAGCCCCAGCCUGUACCUGCAGUGCCUGAGCCAGAAGCUGAGACAGGAGAGAAAGAGACCCCUGCUGGAC |
| | CUGCACAUCGAGCUGAACGGCUACAUGUACGACUGGAACAGCAGAGUGAGCGCCAAGGAGAAGUACUAC |
| | GUGUGGCUGCAGCACACCCUGAGAAAGAAGCUGAUCCUGAGCUACACC |
| | (hu-cFLIP-L; P1006 without epitope tag) |
| 1470 | AUGAGCGCCGAGGUGAUCCACCAGGUGGAGGAGGCCCUGGACACCGACGAGAAGGAGAUGCUGCUGUUC |
| | CUGUGCAGAGACGUGGCCAUCGACGUGGUGCCCCCCAACGUGAGAGACCUGCUGGACAUCCUGAGAGAG |
| | AGAGGCAAGCUGAGCGUGGGCGACCUGGCCGAGCUGCUGUACAGAGUGAGAAGAUUCGACCUGCUGAAG |
| | AGAAUCCUGAAGAUGGACAGAAAGGCCGUGGAGACCCACCUGCUGAGAAACCCCCACCUGGUGAGCGACU |
| | ACAGAGUGCUGAUGGCCGAGAUCGGCGAGGACCUGGACAAGAGCGACGUGAGCAGCCUGAUCUUCCUGA |
| | UGAAGGACUACAUGGGCAGAGGCAAGAUCAGCAAGGAGAAGAGCUUCCUGGACCUGGUGGUGGAGCUG |
| | GAGAAGCUGAACCUGGUGGCCCCCGACCAGCUGGACCUGCUGGAGAAGUGCCUGAAGAACAUCCACAGAA |
| | UCGACCUGAAGACCAAGAUCCAGAAGUACAAGCAGAGCGUGCAGGGCGCCGGCACCAGCUACAGAAACGU |
| | GCUGCAGGCCGCCAUCCAGAAGAGCCUGAAGGACCCCAGCAACAACUUCAGACUGCACAACGGCAGAAGCA |
| | AGGAGCAGAGACUGAAGGAGCAGCUGGGCGCCCAGCAGGAGCCCGUGAAGAAGAGC |
| | (hu-cFLIP-S(1-227); P1007 without epitope tag) |
| 1471 | AUGAGCGCCGAGGUGAUCCACCAGGUGGAGGAGGCCCUGGACACCGACGAGAAGGAGAUGCUGCUGUUC |
| | CUGUGCAGAGACGUGGCCAUCGACGUGGUGCCCCCCAACGUGAGAGACCUGCUGGACAUCCUGAGAGAG |
| | AGAGGCAAGCUGAGCGUGGGCGACCUGGCCGAGCUGCUGUACAGAGUGAGAAGAUUCGACCUGCUGAAG |
| | AGAAUCCUGAAGAUGGACAGAAAGGCCGUGGAGACCCACCUGCUGAGAAACCCCCACCUGGUGAGCGACU |
| | ACAGAGUGCUGAUGGCCGAGAUCGGCGAGGACCUGGACAAGAGCGACGUGAGCAGCCUGAUCUUCCUGA |
| | UGAAGGACUACAUGGGCAGAGGCAAGAUCAGCAAGGAGAAGAGCUUCCUGGACCUGGUGGUGGAGCUG |
| | GAGAAGCUGAACCUGGUGGCCCCCGACCAGCUGGACCUGCUGGAGAAGUGCCUGAAGAACAUCCACAGAA |
| | UCGACCUGAAGACCAAGAUCCAGAAGUACAAGCAGAGCGUGCAGGGCGCCGGCACCAGCUACAGAAACGU |
| | GCUGCAGGCCGCCAUCCAGAAGAGCCUGAAGGAC |
| | (hu-cFLIP-p22(1-198); P1008 without epitope tag) - nucleotide |
| 1472 | AUGAGCGCCGAGGUGAUCCACCAGGUGGAGGAGGCCCUGGACACCGACGAGAAGGAGAUGCUGCUGUUC |
| | CUGUGCAGAGACGUGGCCAUCGACGUGGUGCCCCCCAACGUGAGAGACCUGCUGGACAUCCUGAGAGAG |
| | AGAGGCAAGCUGAGCGUGGGCGACCUGGCCGAGCUGCUGUACAGAGUGAGAAGAUUCGACCUGCUGAAG |
| | AGAAUCCUGAAGAUGGACAGAAAGGCCGUGGAGACCCACCUGCUGAGAAACCCCCACCUGGUGAGCGACU |
| | ACAGAGUGCUGAUGGCCGAGAUCGGCGAGGACCUGGACAAGAGCGACGUGAGCAGCCUGAUCUUCCUGA |
| | UGAAGGACUACAUGGGCAGAGGCAAGAUCAGCAAGGAGAAGAGCUUCCUGGACCUGGUGGUGGAGCUG |
| | GAGAAGCUGAACCUGGUGGCCCCCGACCAGCUGGACCUGCUGGAGAAGUGCCUGAAGAACAUCCACAGAA |
| | UCGACCUGAAGACCAAGAUCCAGAAGUACAAGCAGAGCGUGCAGGGCGCCGGCACCAGCUACAGAAACGU |
| | GCUGCAGGCCGCCAUCCAGAAGAGCCUGAAGGACCCCAGCAACAACUUCAGACUGCACAACGGCAGAAGCA |
| | AGGAGCAGAGACUGAAGGAGCAGCUGGGCGCCCAGCAGGAGCCCGUGAAGAAGAGCAUCCAGGAGAGCG |
| | AGGCCUUCCUGCCCCAGAGCAUCCCCGAGGAGAGAUACAAGAUGAAGAGCAAGCCCCUGGGCAUCUGCCU |
| | GAUCAUCGACUGCAUCGGCAACGAGACCGAGCUGCUGAGAGACACCUUCACCAGCCUGGGCUACGAGGUG |
| | CAGAAGUUCCUGCACCUGAGCAUGCACGGCAUCAGCCAGAUCCUGGGCCAGUUCGCCUGCAUGCCCGAGC |
| | ACAGAGACUACGACAGCUUCGUGUGCGUGCUGGUGAGCAGAGGCGGCAGCCAGAGCGUGUACGGCGUGG |
| | ACCAGACCCACAGCGGCCUGCCCCUGCACCACAUCAGAAGAAUGUUCAUGGGCGACAGCUGCCCCUACCUG |
| | GCCGGCAAGCCCAAGAUGUUCUUCAUCCAGAACUACGUGGUGAGCGAGGGCCAGCUGGAGGACAGCAGCC |
| | UGCUGGAGGUGGAC |
| | (hu-cFLIP-p43(1-376); P1009 without epitope tag) - nucleotide |
| 1473 | AUGGGCCCCGCCAUGAAGAACGUGGAGUUCAAGGCCCAGAAGAGAGGCCUGUGCACCGUGCACAGAGAG |
| | GCCGACUUCUUCUGGAGCCUGUGCACCGCCGACAUGAGCCUGCUGGAGCAGAGCCACAGCAGCCCCAGCC |
| | UGUACCUGCAGUGCCUGAGCCAGAAGCUGAGACAGGAGAGAAAGAGACCCCUGCUGGACCUGCACAUCGA |
| | GCUGAACGGCUACAUGUACGACUGGAACAGCAGAGUGAGCGCCAAGGAGAAGUACUACGUGUGGCUGCA |
| | GCACACCCUGAGAAAGAAGCUGAUCCUGAGCUACACC |
| | (hu-cFLIP-p12(377-480); P1010 without epitope tag) - nucleotide |
| 1474 | AUGCAGCCCGACAUGAGCCUGAACGUGAUCAAGAUGAAGAGCAGCGACUUCCUGGAAUCGGCCGAGCUG |
| | GACAGCGGCGGCUUCGGCAAGGUGAGCCUGUGCUUCCACAGAACUCAGGGCCUGAUGAUCAUGAAGACC |
| | GUGUACAAGGGCCCCAAUUGCAUCGAGCACAACGAGGCCUUACUGGAGGAGGCCAAGAUGAUGAACAGA |
| | CUGAGACAUUCGAGAGUGGUCAAGUUACUGGGCGUGAUCAUCGAGGAAGGCAAGUACAGCCUGGUGAU |
| | GGAGUACAUGGAAAAGGGCAACCUGAUGCACGUGCUGAAGGCCGAGAUGAGCACCCCCCUGAGCGUGAA |
| | GGGCAGAAUCAUCCUGGAGAUUAUCGAGGGGAUGUGCUACCUGCACGGCAAGGGCGUGAUCCACAAGGA |
| | CCUGAAGCCGGAGAACAUCCUGGUGGACAACGACUUCCACAUCAAGAUCGCCGACCUGGGCCUGGCCAGC |
| | UUUAAGAUGUGGAGCAAGCUGAACAACGAGGAGCACAACGAGUUAAGAGAGGUGGACGGCACCGCCAAG |
| | AAGAACGGCGGCACCUUAUACUACAUGGCCCCCGAGCACCUGAACGAUGUGAACGCCAAGCCCACCGAGAA |
| | GAGCGACGUGUACUCCUUUGCCGUGGUCCUGUGGGCCAUCUUCGCCAACAAGGAGCCCUACGAGAACGCC |
| | AUUUGCGAGCAGCAGCUGAUCAUGUGCAUUAAGAGCGGCAACAGACCCGACGUGGACGACAUCACCGAG |
| | UACUGCCCCAGAGAGAUUAUCAGCCUGAUGAAGCUGUGCUGGGAGGCCAACCCCGAGGCUAGACCCACCU |
| | UCCCUGGGAUCGAGGAGAAAUUCAGACCCUUCUACCUGAGCCAGCUGGAGGAGAGCGUGGAAGAGGACG |
| | UGAAGAGCCUGAAGAAAGAGUACAGCAACGAGAACGCUGUGGUGAAGCGCAUGCAGAGCCUGCAGCUGG |
| | ACUGCGUGGCCGUCCCCAGCAGCAGAAGCAACAGUGCCACCGAGCAGCCGGGCUCGCUGCACUCCAGCCAG |
| | GGCCUGGGCAUGGGCCCCGUGGAGGAGAGCUGGUUCGCCCCCUCGCUGGAGCACCCCCAGGAGGAGAACG |
| | AACCUAGCCUGCAGAGCAAGCUGCAGGACGAGGCCAACUACCACCUGUACGGCAGCAGAAUGGACAGACA |
| | GACCAAGCAGCAACCAAGACAGAACGUGGCCUACAACAGAGAGGAGGAACGAAGAAGAAGAGUGAGCCAC |
| | GACCCCUUCGCCCAGCAGAGACCCUACGAGAACUUCCAGAACACCGAGGGCAAGGGCACCGCCUAUAGCAG |
| | CGCCGCCAGCCACGGCAACGCAGUGCACCAGCCCAGCGGCCUGACCUCUCAGCCCCAGGUGCUGUACCAGA |
| | AUAAUGGCCUGUAUAGCAGCCACGGCUUCGGCACCAGACCCCUGGACCCAGGCACCGCCGGCCCUAGAGU |
| | GUGGUACAGACCCAUCCCAAGCCACAUGCCCAGCCUGCACAACAUACCGGUGCCCGAGACAAACUACUUGG |
| | GCAACACCCCCACCAUGCCCUUCAGCAGCCUGCCCCCCACAGACGAGAGCAUCAAGUACACCAUCUAUAACA |
| | GCACCGGCAUCCAGAUCGGCGCCUACAACUAUAUGGAGAUCGGCGGUACCAGCAGCAGCGGCGGCAUCAA |
| | GAAGGAGAUAGAGGCAAUCAAGAAGGAGCAGGAGGCCAUCAAGAAGAAGAUCGAAGCCAUCGAGAAGGA |
| | GAUUGAGGCC |
| | (huRIPK1(1-555).IZ.TM; TH1021 without epitope tag) - nucleotide |
| 1475 | AUGCAGCCCGACAUGAGCCUGAAUGUGAUCAAGAUGAAGAGCAGCGACUUCCUGGAGAGCGCCGAGCUG |
| | GAUAGCGGCGGAUUCGGCAAGGUGAGCCUGUGCUUCCACAGAACCCAAGGCCUGAUGAUCAUGAAGACC |
| | GUGUACAAGGGACCCAACUGCAUCGAGCACAACGAAGCCCUGUUAGAGGAAGCCAAGAUGAUGAAUAGAC |
| | UGCGUCACUCUAGGGUGGUUAAACUGCUGGGCGUGAUCAUCGAGGAGGGCAAGUACAGCCUGGUGAUG |
| | GAGUACAUGGAGAAGGGCAACCUUAUGCACGUGCUGAAGGCCGAGAUGUCCACCCCCCUGAGCGUGAAG |
| | GGCAGAAUCAUCCUGGAGAUCAUCGAGGGAAUGUGUUAUCUGCAUGGCAAGGGCGUGAUCCACAAAGAC |
| | CUGAAGCCCGAGAACAUCCUGGUGGACAACGAUUUCCACAUCAAGAUCGCCGACCUGGGCCUGGCCAGCU |
| | UCAAGAUGUGGAGCAAGCUGAACAACGAGGAGCACAACGAACUGAGAGAGGUGGAUGGCACCGCCAAGA |
| | AAAACGGCGGCACCCUGUAUUACAUGGCCCCCGAGCACCUGAACGACGUGAACGCCAAGCCCACCGAGAAG |
| | AGCGACGUUUACAGCUUUGCCGUGGUGCUGUGGGCCAUCUUCGCCAACAAGGAGCCCUACGAGAACGCC |
| | AUCUGCGAGCAGCAGCUGAUCAUGUGCAUCAAGAGCGGCAACAGACCCGACGUGGACGACAUCACCGAGU |
| | ACUGCCCCCGUGAGAUCAUUAGCCUGAUGAAGCUGUGCUGGGAGGCCAACCCCGAGGCCAGACCCACCUU |
| | CCCCGGCAUUGAGGAGAAGUUCAGACCCUUCUACCUGAGCCAGUUAGAGGAAAGCGUGGAGGAGGACGU |
| | GAAAAGCCUGAAGAAAGAGUACUCUAACGAGAACGCCGUGGUGAAACGCAUGCAGAGCCUGCAGCUGGA |
| | UUGCGUGGCCGUGCCCAGCUCCAGAAGCAACAGCGCCACCGAACAACCUGGCAGCCUGCACAGCUCCCAGG |
| | GCCUGGGCAUGGGCCCCGUGGAGGAGAGCUGGUUCGCCCCCUCCCUGGAGCAUCCGCAGGAGGAGAACG |
| | AGCCCUCUCUGCAGUCCAAGCUGCAAGACGAGGCCAACUACCACCUGUACGGCAGCAGAAUGGACAGACA |
| | GACCAAGCAGCAACCCAGACAAAAUGUGGCCUACAAUAGAGAGGAGGAGAGAAGAAGAAGAGUGAGCCAC |
| | GACCCUUUCGCCCAGCAGAGACCCUACGAGAACUUCCAGAAUACCGAGGGCAAGGGUACCGCCUACAGCU |
| | CAGCGGCCUCGCACGGCAACGCCGUGCACCAGCCCAGCGGCCUGACCAGCCAGCCCCAGGUGCUGUACCAA |
| | AACAACGGCCUGUAUAGCUCCCACGGCUUUGGCACCAGACCCCUGGACCCCGGCACCGCCGGCCCCAGAGU |
| | CUGGUAUAGACCCAUCCCCAGCCAUAUGCCUAGCCUGCACAACAUCCCCGUGCCCGAGACCAACUACCUGG |
| | GCAAUACCCCCACCAUGCCGUUCAGCAGCUUACCCCCCACCGACGAGAGCAUCAAGUACACCAUCUACAAC |
| | AGCACCGGCAUCCAGAUCGGCGCCUACAACUACAUGGAAAUCGGCGGAACCAGCAGCAGCGGCAGCGACG |
| | GCAGCGGCUCCGGAAGCGGAAGCAUAACCAUCAGGGCCGCCUUCCUGGAGAAGGAAAAUACCGCGCUGAG |
| | AACAGAGAUUGCCGAGUUAGAAAAGGAGGUGGGCAGAUGCGAGAACAUAGUGAGCAAGUACGAGACCAG |
| | AUACGGCCCCCUG |
| | (huRIPK1(1-555).EE.DM; TH1022 without epitope tag) - nucleotide |
| 1476 | AUGCAACCCGACAUGAGCUUGAACGUGAUCAAGAUGAAGAGCAGCGAUUUCCUGGAGAGCGCCGAGCUG |
| | GACAGCGGCGGCUUCGGCAAGGUGAGCCUGUGUUUCCACAGAACCCAGGGCCUGAUGAUCAUGAAGACA |
| | GUGUACAAGGGCCCCAACUGCAUCGAGCACAACGAGGCCCUGCUGGAGGAGGCUAAGAUGAUGAACAGAC |
| | UGAGACACAGCAGAGUCGUGAAGCUGCUGGGCGUGAUCAUCGAAGAGGGCAAGUACAGCCUGGUGAUG |
| | GAGUACAUGGAGAAAGGCAACCUUAUGCACGUGCUCAAGGCCGAGAUGAGCACCCCUCUGAGCGUGAAG |
| | GGAAGAAUCAUCCUGGAGAUCAUCGAGGGCAUGUGCUACCUGCACGGCAAGGGCGUCAUCCAUAAGGAC |
| | CUGAAGCCCGAGAAUAUCCUUGUGGACAACGACUUCCAUAUCAAGAUCGCCGACCUCGGCCUGGCCAGCU |
| | UCAAGAUGUGGAGCAAGCUGAACAACGAGGAGCACAACGAGCUGAGAGAGGUAGACGGCACCGCCAAGAA |
| | AAAUGGCGGCACCCUGUACUACAUGGCUCCCGAGCACCUGAAUGACGUGAACGCCAAGCCUACCGAAAAG |
| | AGCGACGUGUAUAGCUUCGCCGUGGUGCUCUGGGCCAUCUUCGCCAACAAGGAGCCUUAUGAGAAUGCA |
| | AUCUGCGAGCAGCAGCUGAUCAUGUGCAUCAAGAGCGGCAACAGACCCGACGUGGACGACAUCACCGAAU |
| | ACUGCCCCAGAGAGAUCAUCAGCCUGAUGAAGCUGUGCUGGGAGGCCAACCCCGAGGCCAGACCCACCUU |
| | CCCCGGCAUUGAGGAGAAGUUCAGACCCUUCUACCUGAGCCAGUUGGAAGAGAGCGUGGAGGAGGACGU |
| | CAAAAGCCUGAAGAAGGAGUACAGCAACGAGAACGCCGUCGUGAAGAGAAUGCAGAGCCUGCAGCUGGAC |
| | UGCGUGGCCGUGCCUAGCAGCAGAAGCAACAGCGCCACCGAGCAGCCCGGCAGCCUGCACAGCAGCCAGG |
| | GCCUUGGAAUGGGCCCCGUGGAGGAAAGCUGGUUCGCCCCCAGCCUUGAGCAUCCGCAGGAGGAGAACG |
| | AGCCCAGCCUGCAGAGCAAGCUGCAGGACGAAGCCAACUAUCACCUGUACGGCAGCAGAAUGGACCGACA |
| | GACCAAGCAGCAGCCCAGACAGAACGUGGCCUAUAACCGAGAGGAGGAGAGAAGAAGAAGGGUGAGCCAC |
| | GACCCCUUCGCCCAACAGAGACCCUACGAGAACUUCCAGAACACCGAGGGCAAGGGCACCGCUUACAGUAG |
| | CGCCGCAAGCCACGGCAACGCCGUGCACCAACCUAGCGGACUGACCAGCCAGCCCCAGGUGCUGUACCAAA |
| | ACAACGGUCUGUACAGCUCACACGGCUUCGGGACCAGACCCUUAGAUCCCGGAACCGCCGGCCCCAGAGU |
| | AUGGUAUAGACCCAUCCCCAGCCACAUGCCCAGCUUGCACAACAUCCCCGUGCCCGAGACCAACUACCUGG |
| | GCAACACCCCCACCAUGCCCUUCAGCAGCCUGCCCCCCACCGACGAGAGCAUCAAAUAUACCAUCUACAACA |
| | GCACCGGAAUCCAGAUCGGGGCCUACAAUUACAUGGAGAUCGGAGGCACCAGCAGCAGCGGCAGCGACGG |
| | UAGCGGAAGCGGCAGCGGCAGCCUCGAGAUCAGAGCCGCCUUCCUGGAGAAGGAGAACACCGCCCUGAGA |
| | ACCAGAGCCGCCGAACUGAGAAAGAGAGUGGGCAGAUGCAGAAACAUCGUGAGCAAGUACGAGACCAGAU |
| | ACGGCCCCCUG |
| | (huRIPK1(1-555).RR.DM; TH1023 without epitope tag) - nucleotide |
| 1477 | AUGCAGCCUGACAUGAGCCUGGACAAUAUCAAGAUGGCCAGCAGCGACCUGCUCGAGAAGACCGACCUGG |
| | ACAGUGGCGGCUUCGGAAAAGUGAGCCUGUGCUACCACAGGUCUCACGGGUUCGUGAUCCUGAAGAAGG |
| | UGUACACCGGCCCCAACAGAGCCGAGUAUAAUGAGGUGCUGCUGGAGGAGGGCAAGAUGAUGCACAGAC |
| | UGAGACAUAGCAGAGUGGUGAAGCUGCUGGGCAUCAUCAUCGAGGAGGGAAACUACAGCCUGGUUAUG |
| | GAGUACAUGGAGAAGGGCAACCUAAUGCACGUGUUGAAGACCCAGAUAGACGUGCCACUGAGCUUAAAG |
| | GGCAGAAUCAUCGUGGAGGCUAUCGAGGGCAUGUGCUACCUGCACGACAAGGGCGUGAUCCACAAAGAC |
| | CUGAAGCCCGAGAACAUACUCGUGGAUAGAGAUUUCCACAUCAAGAUCGCCGACCUGGGCGUGGCCAGCU |
| | UCAAGACUUGGAGCAAGCUGACAAAGGAGAAGGACAACAAGCAGAAGGAGGUGAGCAGCACCACCAAGAA |
| | AAACAACGGCGGCACCCUGUACUACAUGGCCCCUGAGCACCUGAACGACAUCAACGCCAAGCCCACCGAGA |
| | AGAGCGACGUGUAUAGCUUCGGCAUCGUGCUGUGGGCCAUCUUUGCUAAGAAAGAGCCCUACGAGAACG |
| | UGAUCUGCACCGAGCAGUUCGUCAUCUGCAUCAAGAGCGGCAACAGACCCAAUGUGGAGGAGAUCCUGG |
| | AAUACUGCCCCAGAGAGAUCAUCAGCCUCAUGGAGAGAUGCUGGCAGGCCAUCCCUGAGGACAGACCCAC |
| | CUUCCUGGGCAUUGAGGAGGAGUUCAGACCCUUCUACCUGAGCCACUUCGAGGAGUACGUGGAGGAGGA |
| | CGUGGCCAGUCUGAAAAAGGAGUAUCCAGACCAGAGCCCCGUGCUGCAGAGAAUGUUCAGCCUGCAGCAC |
| | GACUGUGUGCCCCUGCCCCCCAGCAGAAGCAACAGCGAGCAGCCGGGCAGCCUGCACAGCAGCCAGGGCU |
| | UACAAAUGGGACCCGUGGAGGAGAGCUGGUUCAGCAGUAGCCCCGAGUACCCCCAGGACGAGAACGACAG |
| | GUCGGUCCAGGCCAAGCUCCAGGAAGAGGCCAGCUACCACGCCUUCGGCAUCUUCGCCGAGAAGCAAACC |
| | AAGCCCCAGCCCAGACAAAACGAAGCCUACAACAGAGAGGAAGAGAGAAAGAGACGCGUAAGCCACGACCC |
| | CUUUGCCCAACAGAGAGCCAGAGAAAACAUCAAGAGCGCCGGCGCCCGGGGCCACUCGGAUCCGAGCACCA |
| | CUAGCAGAGGCAUCGCUGUGCAGCAACUCAGCUGGCCCGCCACCCAGACCGUGUGGAACAACGGCCUGUA |
| | CAACCAGCACGGCUUCGGCACCACCGGCACCGGCGUUUGGUACCCCCCCAACCUGUCGCAGAUGUACAGCA |
| | CCUACAAAACCCCCGUGCCCGAGACCAACAUCCCCGGCAGCACCCCCACCAUGCCCUAUUUCAGCGGCCCCG |
| | UGGCCGACGACCUGAUCAAGUACACCAUCUUCAACAGCAGCGGCAUCCAGAUCGGCAACCACAAUUACAU |
| | GGACGUGGGCCUGAACAGCCAGCCACCCAACAACACCUGCAAGGAAGAAAGCACCAGCGGCGGCAUCAAGA |
| | AGGAAAUCGAGGCCAUCAAGAAGGAGCAGGAAGCCAUAAAGAAGAAAAUCGAGGCCAUCGAGAAGGAGA |
| | UCGAGGCC |
| | (msRIPK1(1-555).IZ.TM; TH1024 without epitope tag) - nucleotide |
| 1478 | AUGCAGCCCGACAUGAGCCUGGACAACAUUAAGAUGGCCAGUAGCGACCUGCUGGAGAAGACCGACCUGG |
| | AUAGCGGGGGCUUCGGCAAGGUGAGCCUGUGCUACCACAGAAGCCACGGAUUCGUGAUCCUGAAGAAGG |
| | UGUACACCGGCCCCAACAGAGCCGAGUACAACGAGGUGCUGCUGGAGGAGGGCAAGAUGAUGCAUAGAC |
| | UGAGACACAGCAGAGUGGUGAAACUGCUGGGGAUCAUCAUCGAAGAGGGCAACUAUAGCCUGGUGAUG |
| | GAAUACAUGGAGAAGGGCAACCUGAUGCACGUGCUGAAGACCCAGAUCGACGUGCCCCUGAGCCUGAAG |
| | GGCAGAAUCAUCGUGGAGGCCAUCGAGGGUAUGUGCUACCUGCACGAUAAGGGCGUGAUCCACAAGGAC |
| | CUGAAACCUGAAAACAUCUUAGUGGACAGAGACUUCCACAUCAAGAUCGCCGACCUGGGAGUGGCUAGC |
| | UUCAAGACCUGGAGCAAACUGACCAAGGAGAAGGAUAACAAGCAGAAGGAAGUGAGCAGCACCACCAAGA |
| | AAAACAACGGAGGCACCCUGUACUACAUGGCCCCCGAGCAUCUGAACGACAUCAACGCCAAGCCCACCGAG |
| | AAGAGCGACGUGUACUCCUUCGGCAUCGUCUUAUGGGCCAUCUUCGCCAAGAAGGAGCCCUACGAGAAC |
| | GUGAUCUGCACCGAACAGUUUGUGAUCUGCAUCAAGAGCGGCAAUAGACCCAACGUGGAGGAGAUCCUG |
| | GAGUACUGCCCCAGAGAGAUCAUCAGCCUGAUGGAGAGGUGCUGGCAGGCUAUCCCCGAGGACAGACCCA |
| | CCUUUCUGGGCAUCGAGGAAGAGUUCAGACCCUUCUAUCUGAGCCACUUCGAGGAGUAUGUUGAGGAG |
| | GACGUGGCCAGCCUGAAGAAGGAGUACCCCGACCAGAGCCCCGUGCUGCAGAGAAUGUUCAGCCUGCAAC |
| | ACGAUUGCGUGCCGCUGCCCCCCAGCAGAUCGAAUAGCGAGCAGCCAGGCAGCCUACACAGCAGUCAGGG |
| | CCUGCAGAUGGGCCCCGUGGAGGAAAGCUGGUUCAGCAGCAGCCCCGAGUACCCCCAGGACGAGAAUGAC |
| | AGAAGCGUGCAAGCAAAGCUGCAAGAGGAGGCCAGCUACCACGCCUUCGGCAUCUUCGCCGAGAAACAGA |
| | CUAAGCCCCAGCCCAGACAGAACGAGGCCUACAACAGAGAGGAGGAGAGAAAAAGACGAGUGAGCCACGA |
| | CCCCUUCGCCCAGCAGAGAGCCAGAGAGAAUAUCAAGAGCGCCGGCGCCAGAGGCCACAGCGACCCCAGCA |
| | CCACCAGCAGAGGAAUCGCCGUGCAGCAGCUGAGCUGGCCCGCCACCCAGACCGUGUGGAACAACGGCCU |
| | GUACAACCAGCACGGCUUUGGCACCACCGGCACCGGCGUGUGGUAUCCCCCCAACCUGAGCCAGAUGUAC |
| | AGCACCUAUAAAACCCCUGUGCCGGAGACCAAUAUCCCCGGCAGCACCCCUACCAUGCCCUACUUCAGCGG |
| | CCCCGUGGCCGACGACCUGAUCAAGUACACGAUCUUCAACAGCAGCGGCAUCCAGAUAGGCAACCACAACU |
| | ACAUGGACGUGGGCCUGAACAGCCAACCCCCCAAUAACACCUGCAAGGAGGAGUCCACCAGCGGCAGCGAC |
| | GGCAGCGGCAGCGGCAGCGGCAGCAUAACCAUCAGAGCUGCUUUCCUGGAGAAGGAGAACACCGCUCUGA |
| | GAACCGAGAUCGCCGAGCUGGAGAAGGAGGUCGGCAGAUGCGAGAAUAUCGUGAGCAAGUACGAGACCA |
| | GAUACGGACCCCUG |
| | (msRIPK1(1-555).EE.DM; TH1025 without epitope tag) - nucleotide |
| 1479 | AUGCAGCCUGAUAUGAGCCUGGACAACAUCAAGAUGGCCAGCAGCGACUUGCUGGAGAAGACCGAUCUG |
| | GACUCCGGCGGCUUUGGCAAGGUGAGCCUGUGUUACCACAGAAGCCACGGCUUCGUGAUCCUGAAAAAG |
| | GUGUACACCGGCCCCAAUAGAGCAGAGUACAACGAGGUGCUGCUGGAGGAGGGCAAGAUGAUGCACAGA |
| | CUGAGGCAUAGCAGAGUGGUGAAACUGCUGGGCAUCAUCAUUGAGGAGGGCAACUACAGCCUGGUGAU |
| | GGAGUACAUGGAGAAGGGCAACCUGAUGCAUGUGCUGAAGACCCAAAUCGACGUGCCCCUGUCGCUGAA |
| | GGGCAGAAUCAUCGUGGAGGCCAUCGAGGGGAUGUGCUACCUGCACGACAAGGGCGUGAUCCACAAGGA |
| | CCUGAAGCCCGAGAACAUCCUGGUGGAUAGAGACUUCCACAUCAAGAUCGCCGACCUGGGCGUUGCCAGC |
| | UUCAAGACCUGGUCUAAACUGACCAAGGAGAAAGACAACAAGCAGAAGGAGGUGAGCAGCACCACCAAGA |
| | AGAACAACGGCGGAACACUGUACUAUAUGGCCCCUGAGCACCUGAACGACAUCAACGCCAAGCCCACCGAG |
| | AAAAGCGAUGUUUACAGCUUCGGCAUCGUGCUGUGGGCCAUCUUCGCCAAGAAGGAGCCCUACGAGAAC |
| | GUGAUCUGCACCGAGCAGUUCGUGAUCUGCAUCAAGAGCGGCAACAGACCCAACGUGGAGGAAAUCCUG |
| | GAGUACUGCCCCAGAGAGAUCAUCAGCCUGAUGGAGAGAUGCUGGCAGGCCAUCCCCGAGGACCGUCCCA |
| | CGUUCCUGGGCAUCGAAGAGGAGUUCCGGCCCUUCUACCUGAGCCAUUUCGAGGAGUAUGUGGAGGAG |
| | GACGUGGCCAGCCUGAAGAAGGAGUACCCCGACCAGAGCCCAGUGCUGCAGAGAAUGUUCAGCCUUCAAC |
| | ACGACUGCGUGCCCCUGCCUCCCUCAAGAAGCAACAGCGAGCAGCCCGGCAGCUUGCACAGCAGCCAGGGC |
| | CUGCAGAUGGGCCCCGUGGAGGAGAGCUGGUUUAGCAGCAGCCCCGAGUACCCCCAGGACGAGAAUGACA |
| | GAAGCGUGCAAGCCAAGUUACAGGAGGAGGCCAGCUACCACGCCUUUGGAAUCUUCGCCGAGAAGCAGAC |
| | CAAGCCCCAGCCCAGACAGAACGAGGCCUACAACAGAGAGGAGGAGAGAAAAAGAAGAGUGAGCCACGACC |
| | CCUUCGCCCAGCAGAGAGCCAGAGAGAACAUUAAGAGCGCCGGCGCGAGAGGCCACAGCGACCCCAGCACC |
| | ACAAGCAGAGGCAUCGCCGUGCAGCAAUUGAGCUGGCCCGCCACCCAGACCGUGUGGAACAACGGCCUGU |
| | AUAACCAGCACGGCUUCGGAACCACCGGCACCGGCGUGUGGUACCCCCCCAAUCUGAGCCAGAUGUACAG |
| | CACUUACAAGACCCCCGUGCCCGAAACCAACAUCCCCGGCAGCACCCCCACCAUGCCCUACUUCAGCGGCCC |
| | CGUGGCCGACGACCUCAUCAAGUACACAAUAUUUAACAGCAGCGGCAUCCAGAUCGGCAACCACAACUACA |
| | UGGACGUGGGCCUGAACAGCCAGCCCCCGAACAAUACCUGCAAGGAGGAGAGCACAAGCGGCUCUGACGG |
| | CAGCGGCAGCGGCAGCGGCUCACUGGAGAUCAGAGCUGCCUUCCUGGAAAAGGAGAACACCGCUCUGAGA |
| | ACCAGAGCCGCCGAGCUGCGAAAGAGAGUAGGCAGAUGCAGAAACAUCGUGAGCAAGUACGAGACCAGAU |
| | ACGGUCCCCUG |
| | (msRIPK1(1-555).RR.DM; TH1026 without epitope tag) - nucleotide |
| 1480 | AUGAGCGCCGGCGACCCCAGAGUGGGCAGCGGCAGCCUGGACAGCUUCAUGUUCAGCAUCCCCCUGGUGG |
| | CCCUGAACGUGGGCGUGAGAAGAAGACUGAGCCUGUUCCUGAACCCCAGAACCCCCGUGGCCGCCGACUG |
| | GACCCUGCUGGCCGAGGAGAUGGGCUUCGAGUACCUGGAGAUCAGAGAGCUGGAGACCAGACCCGACCCC |
| | ACCAGAAGCCUGCUGGACGCCUGGCAGGGCAGAAGCGGCGCCAGCGUGGGCAGACUGCUGGAGCUGCUG |
| | GCCCUGCUGGACAGAGAGGACAUCCUGAAGGAGCUGAAGAGCAGAAUCGAGGAGGACUGCCAGAAGUAC |
| | CUGGGCAAGCAGCAGAACCAGGAGAGCGAGAAGCCCCUGCAGGUGGCCAGAGUGGAGAGCAGCGUGCCCC |
| | AGACCAAGGAGCUGGGCGGCAUCACCACCCUGGACGACCCCCUGGGCCAGACCCCCGAGCUGUUCGACGCC |
| | UUCAUCUGCUACUGCCCCAACGACAUCGAGUUCGUGCAGGAGAUGAUCAGACAGCUGGAGCAGACCGACU |
| | ACAGACUGAAGCUGUGCGUGAGCGACAGAGACGUGCUGCCCGGCACCUGCGUGUGGAGCAUCGCCAGCG |
| | AGCUGAUCGAGAAGAGAUGCAGAAGAAUGGUGGUGGUGGUGAGCGACGACUACCUGCAGAGCAAGGAG |
| | UGCGACUUCCAGACCAAGUUCGCCCUGAGCCUGAGCCCCGGCGUGCAGCAGAAGAGACCCAUCCCCAUCAA |
| | GUACAAGGCCAUGAAGAAGGACUUCCCCAGCAUCCUGAGAUUCAUCACCAUCUGCGACUACACCAACCCCU |
| | GCACCAAGAGCUGGUUCUGGACCAGACUGGCCAAGGCCCUGAGCCUGCCC |
| | (human myd88(L265P); P4027 without epitope tag) - nucleotide |
| 1481 | AUGGGCGUGGGCAAGAGCAAGCUGGACAAGUGCCCCCUGAGCUGGCACAAGAAGGACAGCGUGGACGCC |
| | GACCAGGACGGCCACGAGAGCGACAGCAAGAACAGCGAGGAGGCCUGCCUGAGAGGCUUCGUGGAGCAGA |
| | GCAGCGGCAGCGAGCCCCCCACCGGCGAGCAGGACCAGCCCGAGGCCAAGGGCGCCGGCCCCGAGGAGCAG |
| | GACGAGGAGGAGUUCCUGAAGUUCGUGAUCCUGCACGCCGAGGACGACACCGACGAGGCCCUGAGAGUG |
| | CAGGACCUGCUGCAGAACGACUUCGGCAUCAGACCCGGCAUCGUGUUCGCCGAGAUGCCCUGCGGCAGAC |
| | UGCACCUGCAGAACCUGGACGACGCCGUGAACGGCAGCGCCUGGACCAUCCUGCUGCUGACCGAGAACUU |
| | CCUGAGAGACACCUGGUGCAACUUCCAGUUCUACACCAGCCUGAUGAACAGCGUGAGCAGACAGCACAAG |
| | UACAACAGCGUGAUCCCCAUGAGACCCCUGAACAGCCCCCUGCCCAGAGAGAGAACCCCCCUGGCCCUGCA |
| | GACCAUCAACGCCCUGGAGGAGGAGAGCCAGGGCUUCAGCACCCAGGUGGAGAGAAUCUUCAGAGAGAGC |
| | GUGUUCGAGAGACAGCAGAGCAUCUGGAAGGAGACCAGAAGCGUGAGCCAGAAGCAGUUCAUCGCC |
| | (Mouse TRAM(TICAM2); P4033 without epitope tag) - nucleotide |
| 1482 | AUGAGCACCGCCAGCGCCGCCAGCUCAAGCUCCUCCUCUAGCGCCGGCGAGAUGAUCGAGGCCCCCAGCCA |
| | GGUGCUGAACUUCGAGGAGAUCGACUACAAGGAAAUCGAGGUGGAGGAGGUGGUGGGCAGAGGCGCCU |
| | UCGGCGUGGUGUGCAAGGCCAAGUGGAGAGCCAAGGACGUGGCCAUCAAGCAGAUCGAGAGCGAGUCCG |
| | AGAGAAAGGCCUUCAUCGUGGAGCUGAGACAGCUGAGCAGAGUGAACCACCCCAACAUCGUGAAGCUGU |
| | ACGGCGCCUGCCUGAACCCCGUGUGCCUGGUGAUGGAGUACGCCGAGGGCGGCAGCCUGUACAACGUGC |
| | UGCACGGCGCCGAGCCCCUGCCCUACUACACCGCCGCCCACGCCAUGAGCUGGUGCCUGCAGUGCAGCCAG |
| | GGCGUGGCCUACCUGCACAGCAUGCAGCCCAAGGCCCUGAUCCACCGCGAUCUGAAGCCCCCCAACCUGCU |
| | GCUGGUGGCCGGCGGCACCGUGCUGAAGAUCUGCGACUUCGGCACCGCCUGCGACAUCCAGACCCACAUG |
| | ACCAACAACAAGGGAUCAGCUGCGUGGAUGGCCCCCGAGGUGUUCGAGGGCAGCAACUACAGCGAGAAG |
| | UGCGACGUGUUCAGCUGGGGCAUCAUCCUGUGGGAGGUGAUCACCAGAAGAAAGCCCUUCGACGAGAUC |
| | GGCGGCCCCGCCUUCAGAAUCAUGUGGGCCGUGCACAACGGCACCAGACCGCCGCUGAUCAAGAACCUGC |
| | CCAAGCCCAUCGAGUCCCUGAUGACCAGAUGCUGGAGCAAGGACCCGAGCCAGAGGCCCAGCAUGGAAGA |
| | GAUCGUUAAGAUCAUGACCCACCUGAUGAGAUACUUCCCGGGCGCCGAUGAACCGCUGCAGUACCCCUGC |
| | CAGGAGUUCGGCGGAGGCGGCGGCCAGAGCCCCACCCUGACCCUGCAGAGCACCAACACCCACACCCAGAG |
| | CAGCAGCAGUAGCAGCGACGGCGGCCUGUUCAGAAGCAGACCCGCCCACAGCCUGCCCCCCGGCGAGGACG |
| | GCAGAGUGGAGCCCUACGUGGACUUCGCCGAGUUCUACAGACUGUGGAGCGUGGACCACGGCGAGCAGA |
| | GCGUGGUGACCGCCCCC |
| | (humanTAK1-TAB1; P4031 without epitope tag) - nucleotide |
| 1483 | AUGGAGAACCUGAAGCACAUCAUCACCCUGGGCCAGGUGAUCCACAAGAGAUGCGAGGAGAUGAAGUAC |
| | UGCAAGAAGCAGUGCAGAAGACUGGGCCACAGAGUGCUGGGCCUGAUCAAGCCCCUGGAGAUGCUGCAG |
| | GACCAGGGCAAGAGAAGCGUGCCCAGCGAGAAGCUGACCACCGCCAUGAACAGAUUCAAGGCCGCCCUGG |
| | AGGAGGCCAACGGCGAGAUCGAGAAGUUCAGCAACAGAAGCAACAUCUGCAGAUUCCUGACCGCCAGCCA |
| | GGACAAGAUCCUGUUCAAGGACGUGAACAGAAAGCUGAGCGACGUGUGGAAGGAGCUGAGCCUGCUGCU |
| | GCAGGUGGAGCAGAGAAUGCCCGUGAGCCCCAUCAGCCAGGGCGCCAGCUGGGCCCAGGAGGACCAGCAG |
| | GACGCCGACGAGGACAGAAGAGCCUUCCAGAUGCUGAGAAGAGACAACGAGAAGAUCGAGGCCAGCCUGA |
| | GAAGACUGGAGAUCAACAUGAAGGAGAUCAAGGAGACCCUGAGACAGUAC |
| | (human MLKL(1-180) ORF nucleotide sequence; no epitope tag) |
| 1484 | AUGGAGCACGACCUUGAGAGAGGCCCUCCGGGCCCUAGAAGACCUCCUCGAGGUCCUCCACUUAGCAGCA |
| | GCUUGGGCCUCGCUCUCUUAUUGUUGCUACUUGCCUUGUUGUUCUGGUUGUACAUCGUGAUGAGCGAC |
| | UGGACCGGCGGCGCCCUUCUGGUGCUGUACAGCUUCGCCCUGAUGCUGAUCAUUAUCAUACUGAUUAUC |
| | UUCAUAUUCAGAAGAGAUCUGCUGUGCCCUCUGGGCGCCUUAUGCAUUCUGCUUUUGAUGAUCACUCU |
| | GCUCCUCAUCGCACUCUGGAACCUGCACGGCCAGGCCCUGUUCCUGGGCAUCGUGCUGUUCAUCUUCGGC |
| | UGCCUCCUCGUGCUUGGAAUCUGGAUCUACCUGCUGGAGAUGCUGUGGAGACUAGGUGCCACCAUCUGG |
| | CAGCUGCUGGCCUUCUUCCUGGCAUUCUUCUUAGACCUGAUUCUGCUCAUUAUUGCCCUAUACCUGCAG |
| | CAGAACUGGUGGACCCUACUCGUUGAUCUCCUGUGGCUACUGCUGUUCCUUGCUAUCCUGAUUUGGAU |
| | GUACUACCACGGACAAAGACCUUUCGCCGAGGACAAGACCUACAAGUACAUCUGCAGAAACUUCAGCAAC |
| | UUCUGCAACGUGGACGUGGUGGAGAUCCUGCCUUACCUGCCUUGCCUGACCGCCAGGGACCAGGACAGA |
| | CUGAGAGCCACCUGCACCCUGAGCGGCAACAGAGACACCCUGUGGCACCUGUUCAACACCCUGCAGAGGC |
| | GCCCUGGCUGGGUGGAGUACUUCAUCGCCGCCCUGAGAGGCUGCGAGUUGGUUGACCUCGCCGACGAGG |
| | UGGCCAGCGUGUACCAGAGCUACCAGCCUAGAACCAGCGACAGGCCGCCUGACCCUCUGGAGCCUCCUAG |
| | CCUGCCUGCCGAACGGCCUGGCCCACCUACCCCUGCCGCCGCCCACAGCAUCCCUUACAACUCCUGUCGGG |
| | AGAAGGAGCCUAGCUACCCUAUGCCUGUGCAGGAAACGCAGGCCCCAGAAAGUCCUGGCGAGAACAGCGA |
| | GCAGGCCUUGCAGACUCUGAGCCCUAGAGCCAUCCCUAGAAACCCUGACGGCGGUCCUCUCGAGAGUUCC |
| | AGCGACCUGGCUGCACUCUCCCCACUGACCAGCAGCGGCCACCAGGAGCAGGACACCGAGCUGGGCAGCAC |
| | CCACACCGCCGGCGCUACCUCAAGCCUUACCCCUAGCCGGGGCCCAGUCAGCCCUAGCGUGAGCUUCCAGC |
| | CUCUGGCCAGAAGCACACCAAGAGCCAGCAGACUUCCAGGACCAACCGGCAGCGUGGUGAGCACCGGCACC |
| | AGCUUCAGUUCCUCUAGCCCAGGCUUAGCCAGCGCCGGAGCGGCCGAGGGCAAGCAGGGCGCCGAGAGCG |
| | ACCAGGCCGAGCCUAUCAUCUGUUCCUCGGGUGCCGAGGCCCCUGCCAACAGCCUACCUAGCAAGGUGCC |
| | UACCACACUGAUGCCAGUUAACACCGUGGCCCUGAAGGUUCCAGCCAACCCUGCUUCCGUUUCUACAGUG |
| | CCGUCCAAGCUGCCGACGUCAUCCAAGCCUCCGGGAGCCGUGCCAUCUAACGCCCUGACCAAUCCAGCUCC |
| | AAGCAAGCUCCCAAUCAACAGCACCAGAGCCGGCAUGGUGCCUUCAAAGGUGCCGACCUCCAUGGUGCUG |
| | ACCAAGGUGAGCGCCUCUACCGUGCCAACCGACGGAUCUUCUCGGAACGAGGAGACACCUGCUGCUCCUA |
| | CUCCAGCGGGCGCAACUGGAGGCUCCUCGGCUUGGCUGGACAGUUCUAGCGAGAAUAGAGGCCUGGGUA |
| | GUGAGCUGAGUAAGCCGGGCGUGCUCGCAAGCCAGGUGGACAGCCCUUUCAGCGGCUGCUUCGAAGACC |
| | UUGCAAUUUCCGCAUCUACCAGUCUAGGCAUGGGCCCUUGCCACGGCCCUGAGGAGAACGAGUACAAGA |
| | GCGAGGGCACCUUCGGCAUCCACGUGGCCGAGAACCCUAGCAUCCAGCUGCUUGAGGGCAAUCCUGGACC |
| | ACCAGCCGAUCCUGAUGGCGGACCUAGACCUCAGGCCGACAGAAAGUUCCAGGAGAGAGAGGUGCCUUG |
| | UCAUAGACCUUCCCCAGGCGCUCUUUGGCUGCAGGUGGCCGUGACCGGUGUCCUCGUCGUGACAUUACU |
| | GGUGGUGCUCUACAGAAGAAGACUGCAC |
| | (CA-hMAVS ORF nucleotide sequence; no epitope tag) |
| 1485 | AUGAGCUGGUCCCCAAGCCUCACGACCCAGACCUGCGGCGCUUGGGAGAUGAAGGAGAGACUGGGCACG |
| | GGGGGCUUUGGCAACGUGAUCAGAUGGCAUAAUCAGGAAACCGGAGAGCAGAUUGCUAUCAAGCAGUG |
| | UAGACAGGAGCUAAGCCCCCGCAAUAGAGAGAGGUGGUGCCUGGAAAUUCAGAUUAUGAGAAGACUGAC |
| | CCAUCCCAAUGUGGUCGCCGCAAGAGACGUCCCCGAAGGCAUGCAGAACCUGGCCCCCAAUGACCUGCCUC |
| | UUCUGGCCAUGGAAUACUGCCAGGGCGGCGACCUGCGGAAGUACCUGAAUCAGUUUGAAAAUUGCUGCG |
| | GCCUGAGAGAGGGCGCCAUAUUGACACUGCUGAGCGACAUCGCCAGCGCCCUGAGAUACCUGCACGAGAA |
| | CAGAAUAAUUCACAGAGACCUGAAGCCGGAGAAUAUUGUGCUGCAGCAGGGUGAACAGAGGCUCAUCCA |
| | UAAGAUCAUCGACCUGGGGUACGCCAAGGAGCUGGAUCAGGGCGAGCUGUGUACCGAGUUUGUGGGGA |
| | CUCUGCAAUACCUGGCCCCCGAGCUCCUGGAACAGCAGAAGUACACCGUCACAGUGGAUUAUUGGAGCUU |
| | CGGCACGCUGGCCUUCGAGUGCAUCACGGGCUUUAGGCCGUUUCUGCCCAAUUGGCAGCCCGUGCAAUG |
| | GCACAGCAAGGUCAGACAGAAAAGCGAGGUCGACAUCGUAGUGAGCGAAGACCUGAACGGCACUGUCAAG |
| | UUCAGUAGCUCCCUCCCCUACCCUAACAAUCUGAACAGCGUGCUGGCAGAGCGGCUGGAGAAGUGGCUAC |
| | AACUAAUGCUGAUGUGGCACCCCCGACAGCGUGGCACCGACCCCACCUACGGGCCCAACGGAUGCUUCAA |
| | GGCCCUGGACGACAUUCUCAACCUGAAGCUGGUGCACAUCUUGAAUAUGGUGACCGGCACCAUCCACACC |
| | UACCCCGUGACCGAAGACGAAAGCUUGCAGAGCCUGAAGGCCAGAAUUCAACAGGACACAGGCAUCCCCG |
| | AAGAGGAUCAAGAGCUGCUGCAGGAAGCCGGCCUGGCUUUGAUUCCCGACAAACCAGCCACCCAGUGCAU |
| | UAGCGACGGCAAGCUGAACGAGGGCCACACCCUGGACAUGGACCUGGUGUUCCUGUUCGACAACAGCAAG |
| | AUUACCUACGAGACCCAAAUCAGCCCAAGGCCCCAACCCGAGAGCGUGAGCUGCAUCCUGCAAGAGCCCAA |
| | GAGGAAUCUGGCCUUCUUCCAACUAAGAAAGGUGUGGGGCCAAGUGUGGCACAGCAUCCAGACUCUGAA |
| | GGAAGACUGCAAUAGACUGCAACAAGGACAGCGAGCCGCCAUGAUGAACCUGUUAAGAAACAACAGCUGC |
| | UUAUCUAAGAUGAAGAACAGCAUGGCCUCCAUGAGCCAGCAGCUGAAAGCCAAACUGGAUUUCUUCAAG |
| | ACCAGCAUCCAGAUCGACCUGGAGAAGUACAGCGAGCAGACGGAGUUCGGGAUCACCAGCGACAAGCUGC |
| | UGCUGGCUUGGAGGGAAAUGGAACAGGCCGUGGAGCUGUGCGGCAGAGAGAACGAGGUUAAACUGCUG |
| | GUAGAGCGGAUGAUGGCCCUGCAGACCGACAUUGUAGACCUCCAGAGAAGCCCUAUGGGAAGAAAACAG |
| | GGCGGAACACUGGACGACCUGGAGGAGCAGGCUAGAGAGCUGUACAGAAGACUUAGAGAGAAGCCCAGA |
| | GACCAAAGAACCGAGGGCGACAGCCAGGAGAUGGUGAGACUGCUGCUACAGGCUAUUCAAAGUUUCGAG |
| | AAGAAAGUGAGAGUGAUCUACACCCAACUCAGCAAAACCGUGGUGUGUAAGCAGAAGGCCCUGGAGCUG |
| | CUGCCCAAGGUUGAGGAGGUUGUCAGCCUGAUGAAUGAGGAUGAGAAGACCGUGGUGAGACUGCAAGA |
| | GAAAAGGCAGAAAGAACUGUGGAACCUUUUAAAGAUUGCCUGCAGCAAGGUGAGGGGCCCUGUAUCAGG |
| | AUCCCCCGACUCUAUGAACGCCAGCAGACUGAGCCAGCCCGGUCAACUGAUGAGCCAGCCCUCUACCGCCA |
| | GCAACUCCCUGCCCGAGCCAGCCAAGAAGAGCGAGGAACUGGUGGCCGAGGCCCACAAUCUGUGCACCCU |
| | ACUGGAGAACGCCAUUCAGGACACCGUUCGCGAGCAGGACCAGAGCUUCACCGCCCUGGACUGGAGCUGG |
| | CUGCAGACUGAGGAGGAAGAGCACAGCUGCCUGGAGCAGGCCAGC |
| | (huIKK2ca(S177E/S181E); P4005 without epitope tag) - nucleotide |
| 1486 | AUGAGCAGCGUGAAGCUCUGGCCCACCGGCGCCAGCGCCGUGCCCCUAGUGAGCCGGGAGGAGCUUAAGA |
| | AGCUCGAGUUCGUGGGCAAGGGCGGCUUCGGCGUGGUGUUCCGGGCCCACCACCGGACCUGGAACCACG |
| | ACGUGGCCGUGAAGAUCGUGAACAGCAAGAAGAUCAGCUGGGAGGUGAAGGCCAUGGUGAACCUGCGGA |
| | ACGAGAACGUGUUGCUGCUGCUGGGCGUGACCGAGGACCUGCAGUGGGACUUCGUGAGCGGCCAGGCCU |
| | UGGUUACCCGGUUCAUGGAGAACGGCAGCCUGGCCGGCCUGCUGCAGCCCGAGUGCCCCCGGCCCUGGCC |
| | CCUGCUGUGCCGGCUACUGCAGGAGGUGGUGCUGGGCAUGUGCUACCUGCACAGCCUGAACCCCCCACU |
| | UCUGCACCGGGACCUGAAGCCCAGCAACAUCCUGCUGGACCCCGAGCUGCACGCCAAGCUGGCCGACUUCG |
| | GCCUGAGCACCUUCCAGGGCGGCAGCCAGAGCGGCUCCGGAUCUGGCAGCGGAAGCCGGGACAGCGGCGG |
| | CACCCUGGCCUACCUGGACCCAGAGCUGCUGUUCGACGUGAACCUCAAGGCCAGCAAGGCCUCCGACGUG |
| | UACAGCUUCGGCAUCCUGGUGUGGGCCGUGCUGGCUGGAAGGGAGGCCGAGCUGGUGGACAAGACCAGC |
| | CUGAUCCGGGAGACAGUGUGCGACCGGCAGAGCCGGCCUCCUCUCACCGAACUGCCCCCCGGCAGCCCCGA |
| | GACUCCUGGCCUGGAGAAGCUGAAGGAGCUCAUGAUCCACUGCUGGGGCUCCCAGAGCGAGAACCGGCCC |
| | AGCUUCCAGGACUGCGAGCCCAAGACCAACGAGGUGUACAACCUGGUGAAGGACAAGGUGGACGCCGCCG |
| | UGAGCGAGGUCAAGCACUACCUGAGCCAGCACCGGAGCAGCGGCCGGAACCUGAGCGCCCGGGAGCCCAG |
| | CCAGCGGGGCACCGAGAUGGACUGUCCUCGCGAGACAAUGGUGAGCAAGAUGCUGGAUCGGCUGCACCU |
| | GGAGGAGCCUUCAGGCCCCGUGCCCGGCAAGUGUCCUGAGAGACAGGCCCAGGACACCAGCGUGGGCCCU |
| | GCCACCCCUGCACGGACCAGCAGCGACCCCGUGGCCGGCACCCCCCAGAUCCCCCACACCCUGCCCUUCAGA |
| | GGCACCACUCCAGGCCCGGUGUUCACGGAGACACCUGGACCACACCCCCAGCGGAACCAGGGCGACGGUAG |
| | ACACGGCACACCAUGGUACCCAUGGACACCUCCUAACCCCAUGACCGGUCCACCUGCCCUGGUGUUCAACA |
| | ACUGCAGCGAGGUGCAGAUCGGCAACUACAACAGCCUGGUGGCCCCUCCUAGGACCACCGCCAGCAGCAG |
| | CGCCAAGUACGAUCAGGCACAGUUCGGCCGGGGCAGAGGUUGGCAGCCCUUCCACAAGGGAGGAAUCAA |
| | GAAGGAGAUCGAGGCCAUUAAGAAGGAACAGGAAGCUAUAAAGAAGAAGAUUGAAGCUAUCGAGAAGGA |
| | AAUUGAGGCC |
| | (muRIPK3-IZ.Trimer; TH1015 with no epitope tag) - nucleotide |
| 1487 | AUGGCCGCUCUGAAGUCAUGGCUCUCAAGAAGUGUGACCAGCUUCUUCAGGUAUAGGCAGUGCCUGUGC |
| | GUGCCGGUCGUUGCUAACUUUAAAAAACGCUGUUUCAGCGAGCUGAUUCGCCCAUGGCACAAAACCGUG |
| | ACCAUCGGGUUCGGAGUCACACUGUGCGCUGUCCCAAUCGCACAAGCUGUGUAUACGCUUACCUCACUU |
| | UACAGACAGUACACAUCUUUGCUGGGAAAGAUGAAUUCUGAGGAGGAAGACGAGGUGUGGCAAGUUAU |
| | UAUUGGCGCCAGAGCCGAAAUGACAUCGAAGCAUCAGGAAUACCUGAAACUUGAGACCACAUGGAUGAC |
| | GGCAGUCGGACUCUCCGAGAUGGCAGCCGAAGCAGCCUACCAGACAGGUGCCGACCAGGCUAGCAUCACA |
| | GCUCGGAACCAUAUCCAAUUGGUAAAGCUGCAGGUCGAAGAGGUCCACCAACUAAGCCGAAAAGCCGAAA |
| | CCAAACUGGCUGAAGCCCAGAUUGAAGAACUGCGGCAAAAAACCCAGGAAGAGGGCGAGGAGCGAGCCGA |
| | AUCUGAGCAAGAAGCUUAUCUGCGGGAAGAU |
| | (Diablo.3; TH2003 without epitope tag) - nucleotide |
| 1488 | AUGGGCUGCGUGUGCAGCAGCAACCCCGAGGACGACUGGAUGGAGAACGGCGGCAUCAAGAAGGAGAUA |
| | GAAGCCAUUAAGAAAGAGCAGGAGGCCAUCAAGAAGAAGAUCGAGGCCAUCGAGAAGGAGAUCGAAGCC |
| | GGCAGCGGCGGCGGCAGCGGCAGUGGCGGCGGCAGCGACCCCUUCCUGGUGCUGCUGCACAGCUUAAGC |
| | GGCAGCCUGAGCGGCAACGACCUGAUGGAGCUGAAGUUCCUGUGUAGAGAGAGAGUGAGCAAGAGAAAG |
| | CUGGAGAGAGUGCAGAGCGGCCUGGACCUGUUCACCGUGCUGCUGGAGCAGAACGACCUGGAAAGAGGC |
| | CACACCGGCUUGCUGAGAGAGUUGCUGGCCUCACUGAGAAGACACGAUCUGCUGCAGAGACUGGACGAC |
| | UUCGAGGCCGGCACCGCCACCGCCGCCCCCCCCGGAGAAGCCGACCUGCAGGUGGCCUUCGACAUCGUGUG |
| | CGACAACGUGGGCAGAGACUGGAAGAGAUUGGCCAGAGAGCUGAAGGUGAGCGAGGCCAAGAUGGACGG |
| | CAUCGAGGAGAAGUACCCCAGAAGCCUGAGCGAGAGAGUGAGAGAGAGCCUGAAGGUGUGGAAGAACGC |
| | CGAGAAGAAGAACGCCAGCGUGGCUGGGCUGGUGAAGGCCCUGAGAACCUGCAGACUGAACCUGGUGGC |
| | CGAUCUGGUGGAGGAGGCCCAGGAGAGCGUGAGCAAGAGCGAGAACAUGAGCCCCGUGCUGAGAGACAG |
| | CACCGUGAGUAGCAGCGAGACCCCC |
| | (Myr(Lck)-IZ-L-msFADD; TH3002 without epitope tag) - nucleotide |
| 1489 | AUGGGCUGCGUGUGCAGCAGCAACCCCGAGGACGACUGGAUGGAGAACGGCGGCAUCAAAAAGGAGAUC |
| | GAGGCCAUCAAGAAGGAGCAGGAGGCCAUCAAGAAGAAGAUCGAGGCCAUCGAGAAAGAGAUAGAGGCC |
| | GGCAGCGGCGGCGGCAGCGGCAGCGGCGGCGGCAGCCCCGGCGAGGAGGACCUGUGCGCCGCCUUCAACG |
| | UGAUCUGCGACAACGUGGGCAAGGACUGGAGAAGACUGGCCAGACAGCUGAAGGUGAGCGACACCAAGA |
| | UCGACAGCAUCGAGGACAGAUACCCCAGAAACCUGACCGAGAGAGUGAGAGAGAGCCUGAGAAUCUGGAA |
| | GAACACCGAGAAGGAGAACGCCACCGUGGCCCACCUGGUGGGCGCCCUGAGAAGCUGCCAGAUGAACCUG |
| | GUGGCCGACCUGGUGCAGGAGGUGCAGCAGGCCAGAGACCUGCAGAACAGAAGCGGCGCCAUGAGCCCCA |
| | UGAGCUGGAACAGC |
| | (Myr(Lck)-IZ-L-huFADD-DD; TH3003 without epitope tag) - nucleotide |
| 1490 | AUGGGCUGCGUGUGCAGCAGCAACCCCGAGGACGACUGGAUGGAGAACGGCGGCAUCAAGAAAGAGAUC |
| | GAGGCCAUCAAAAAGGAGCAGGAGGCCAUCAAGAAGAAGAUCGAGGCCAUCGAGAAGGAGAUCGAGGCC |
| | GGCUCUGGCGGCGGCAGCGGCAGCGGCGGCGGCAGCCCCCCCGGCGAGGCCGACUUACAGGUGGCCUUCG |
| | ACAUCGUGUGCGACAACGUGGGCAGAGACUGGAAGAGACUGGCCAGAGAGCUGAAGGUGAGCGAGGCCA |
| | AGAUGGACGGCAUCGAGGAGAAGUACCCCAGAAGCCUGAGCGAGAGAGUGAGAGAGAGCCUGAAGGUGU |
| | GGAAGAACGCCGAGAAGAAGAACGCCAGCGUGGCCGGCCUGGUGAAGGCCCUGAGAACCUGCAGACUGAA |
| | CCUGGUGGCCGACCUGGUGGAGGAGGCCCAGGAGAGCGUGAGCAAGAGCGAGAACAUGAGCCCCGUGCU |
| | GAGAGACAGCACCGUGAGC |
| | (Myr(Lck)-IZ-L-msFADD-DD; TH3004 without epitope tag) - nucleotide |
| 1491 | AUGGGCCAGACCGUGACCACCCCCCUGAGCCUCACCCUGGAUCACUGGGGCGGCAUCAAGAAAGAGAUCG |
| | AGGCCAUCAAGAAGGAGCAGGAGGCCAUCAAGAAGAAGAUCGAAGCCAUCGAGAAGGAGAUCGAGGCCG |
| | GCAGCGGCGGCGGCAGCGGCAGCGGCGGCGGCAGCGACCCCUUCCUGGUGCUGCUGCACAGCGUGUCCAG |
| | CAGCCUGAGCAGCAGCGAGCUGACCGAGCUGAAGUUCCUGUGCCUGGGCAGAGUGGGCAAAAGAAAGCU |
| | GGAGAGAGUGCAGAGCGGCCUGGACCUCUUCAGCAUGCUGCUGGAGCAGAACGACUUGGAGCCCGGCCA |
| | CACCGAGCUGCUGAGAGAGCUGCUGGCCAGCCUGCGGAGACACGACCUGCUGAGAAGAGUGGAUGACUU |
| | CGAGGCCGGCGCCGCCGCCGGCGCCGCCCCCGGCGAGGAGGACCUGUGCGCCGCCUUCAACGUGAUCUGC |
| | GACAACGUGGGCAAGGAUUGGAGAAGAUUAGCCAGACAGCUGAAGGUGAGUGACACCAAGAUUGACAGC |
| | AUCGAGGACAGAUACCCCAGAAACCUGACCGAGAGAGUCAGAGAGAGCCUGAGAAUCUGGAAGAAUACCG |
| | AGAAGGAGAACGCCACCGUGGCCCACCUGGUGGGCGCCCUGAGAAGCUGCCAGAUGAACCUGGUGGCCGA |
| | CCUGGUGCAGGAGGUGCAGCAGGCCAGAGACCUGCAGAACAGAAGCGGCGCCAUGAGCCCCAUGAGCUGG |
| | AACAGCGACGCCAGCACCAGCGAGGCCAGC |
| | (Myr(MMSV)-IZ-L-huFADD; TH3005 without epitope tag) - nucleotide |
| 1492 | AUGGGCCAGACAGUGACCACCCCCCUGUCCCUGACCUUGGACCACUGGGGCGGCAUCAAGAAGGAGAUCG |
| | AGGCCAUCAAGAAGGAGCAGGAGGCCAUCAAAAAGAAGAUCGAAGCCAUUGAGAAGGAGAUCGAGGCCG |
| | GAAGCGGGGGCGGCAGCGGCAGCGGCGGAGGAAGCGACCCCUUCCUGGUGCUGCUGCAUAGCCUGUCAG |
| | GCAGCCUGAGCGGCAACGAUCUGAUGGAGCUGAAGUUCCUGUGCCGCGAGAGAGUGAGCAAGAGAAAGC |
| | UGGAGAGAGUACAGAGCGGCCUGGACCUGUUCACCGUGCUGCUGGAGCAGAAUGACCUGGAGAGAGGCC |
| | ACACCGGCUUGCUGAGAGAGUUGCUGGCCAGCCUGAGAAGGCACGACCUGCUGCAGAGACUGGACGACU |
| | UCGAGGCCGGCACCGCCACCGCCGCCCCCCCCGGCGAAGCGGACCUGCAGGUGGCCUUCGACAUCGUGUGC |
| | GACAACGUGGGCAGAGACUGGAAGAGACUGGCCAGAGAACUGAAGGUGAGCGAGGCCAAAAUGGACGGC |
| | AUCGAGGAGAAGUACCCCAGAAGCCUGAGCGAGAGAGUGAGAGAGAGCCUGAAGGUGUGGAAGAACGCC |
| | GAGAAGAAGAACGCCAGCGUGGCCGGCCUGGUGAAGGCCCUGAGAACAUGCAGACUGAACCUGGUGGCC |
| | GAUCUUGUGGAGGAGGCCCAGGAGAGCGUGAGCAAGAGCGAAAACAUGAGCCCCGUGCUGAGAGACAGC |
| | ACCGUGAGCAGCAGCGAGACCCCC |
| | (Myr(MMSV)-IZ-L-msFADD; TH3006 without epitope tag) - nucleotide |
| 1493 | AUGGGCCAGACCGUGACCACCCCCCUGAGCCUGACCCUGGACCACUGGGGCGGCAUCAAGAAGGAGAUCG |
| | AGGCCAUCAAGAAGGAGCAGGAGGCCAUCAAGAAGAAGAUUGAGGCUAUCGAGAAGGAGAUCGAGGCCG |
| | GCAGCGGCGGCGGCAGCGGCAGCGGCGGCGGCAGCCCCGGCGAGGAGGACCUGUGCGCCGCCUUCAACGU |
| | GAUCUGCGACAACGUGGGCAAGGACUGGAGAAGACUGGCCAGACAGCUGAAGGUGAGCGACACCAAGAU |
| | CGACAGCAUCGAGGACAGAUACCCCAGAAACCUGACCGAGAGAGUGAGAGAGAGCCUGAGAAUCUGGAAG |
| | AACACCGAGAAGGAGAACGCCACCGUGGCCCACCUGGUGGGCGCCCUGAGAAGCUGCCAGAUGAACCUGG |
| | UGGCCGACCUGGUGCAGGAGGUGCAGCAGGCCAGAGACCUGCAGAACAGAAGCGGCGCCAUGAGCCCCAU |
| | GAGCUGGAACAGC |
| | (Myr(MMSV)-IZ-L-huFADD-DD; TH3007 without epitope tag) - nucleotide |

The application's sequence listing, which the Patent Office published only in electronic form, follows.

SEQUENCE LISTING (1493 sequences)

SEQ ID NO: 1 - protein, 379 aa, Artificial Sequence
  Synthetic: (huSTING(V155M); no epitope tag)
MPHSSLHPSIPCPRGHGAQKAALVLLSACLVTLWGLGEPPEHTLRYLVLHLASLQLGLLLNGVCSLAEELRHIHSRYRGSYWRTVRACLGCPLRRGALLLLSIYFYYSLPNAVGPPFTWMLALLGLSQALNILLGLKGLAPAEISAVCEKGNFNMAHGLAWSYYIGYLRLILPELQARIRTYNQHYNNLLRGAVSQRLYILLPLDCGVPDNLSMADPNIRFLDKLPQQTGDHAGIKDRVYSNSIYELLENGQRAGTCVLEYATPLQTLFAMSQYSQAGFSREDRLEQAKLFCRTLEDILADAPESQNNCRLIAYQEPADDSSFSLSQEVLRHLRQEEKEEVTVGSLKTSAVPSTSTMSQEPELLISGMEKPLPLRTDFS

SEQ ID NO: 2 - protein, 379 aa, Artificial Sequence
  Synthetic: (Hu STING(R284T); no epitope tag)
MPHSSLHPSIPCPRGHGAQKAALVLLSACLVTLWGLGEPPEHTLRYLVLHLASLQLGLLLNGVCSLAEELRHIHSRYRGSYWRTVRACLGCPLRRGALLLLSIYFYYSLPNAVGPPFTWMLALLGLSQALNILLGLKGLAPAEISAVCEKGNFNVAHGLAWSYYIGYLRLILPELQARIRTYNQHYNNLLRGAVSQRLYILLPLDCGVPDNLSMADPNIRFLDKLPQQTGDHAGIKDRVYSNSIYELLENGQRAGTCVLEYATPLQTLFAMSQYSQAGFSREDTLEQAKLFCRTLEDILADAPESQNNCRLIAYQEPADDSSFSLSQEVLRHLRQEEKEEVTVGSLKTSAVPSTSTMSQEPELLISGMEKPLPLRTDFS

SEQ ID NO: 3 - protein, 379 aa, Artificial Sequence
  Synthetic: (hu STING (R284M); no epitope tag)
MPHSSLHPSIPCPRGHGAQKAALVLLSACLVTLWGLGEPPEHTLRYLVLHLASLQLGLLLNGVCSLAEELRHIHSRYRGSYWRTVRACLGCPLRRGALLLLSIYFYYSLPNAVGPPFTWMLALLGLSQALNILLGLKGLAPAEISAVCEKGNFNVAHGLAWSYYIGYLRLILPELQARIRTYNQHYNNLLRGAVSQRLYILLPLDCGVPDNLSMADPNIRFLDKLPQQTGDHAGIKDRVYSNSIYELLENGQRAGTCVLEYATPLQTLFAMSQYSQAGFSREDMLEQAKLFCRTLEDILADAPESQNNCRLIAYQEPADDSSFSLSQEVLRHLRQEEKEEVTVGSLKTSAVPSTSTMSQEPELLISGMEKPLPLRTDFS

SEQ ID NO: 4 - protein, 379 aa, Artificial Sequence
  Synthetic: (Hu STING (R284K); no epitope tag)
MPHSSLHPSIPCPRGHGAQKAALVLLSACLVTLWGLGEPPEHTLRYLVLHLASLQLGLLLNGVCSLAEELRHIHSRYRGSYWRTVRACLGCPLRRGALLLLSIYFYYSLPNAVGPPFTWMLALLGLSQALNILLGLKGLAPAEISAVCEKGNFNVAHGLAWSYYIGYLRLILPELQARIRTYNQHYNNLLRGAVSQRLYILLPLDCGVPDNLSMADPNIRFLDKLPQQTGDHAGIKDRVYSNSIYELLENGQRAGTCVLEYATPLQTLFAMSQYSQAGFSREDKLEQAKLFCRTLEDILADAPESQNNCRLIAYQEPADDSSFSLSQEVLRHLRQEEKEEVTVGSLKTSAVPSTSTMSQEPELLISGMEKPLPLRTDFS

SEQ ID NO: 5 - protein, 379 aa, Artificial Sequence
  Synthetic: (Hu STING(N154S); no epitope tag)
MPHSSLHPSIPCPRGHGAQKAALVLLSACLVTLWGLGEPPEHTLRYLVLHLASLQLGLLLNGVCSLAEELRHIHSRYRGSYWRTVRACLGCPLRRGALLLLSIYFYYSLPNAVGPPFTWMLALLGLSQALNILLGLKGLAPAEISAVCEKGNFSVAHGLAWSYYIGYLRLILPELQARIRTYNQHYNNLLRGAVSQRLYILLPLDCGVPDNLSMADPNIRFLDKLPQQTGDHAGIKDRVYSNSIYELLENGQRAGTCVLEYATPLQTLFAMSQYSQAGFSREDRLEQAKLFCRTLEDILADAPESQNNCRLIAYQEPADDSSFSLSQEVLRHLRQEEKEEVTVGSLKTSAVPSTSTMSQEPELLISGMEKPLPLRTDFS

SEQ ID NO: 6 - protein, 379 aa, Artificial Sequence
  Synthetic: (Hu STING(V147L); no epitope tag)
MPHSSLHPSIPCPRGHGAQKAALVLLSACLVTLWGLGEPPEHTLRYLVLHLASLQLGLLLNGVCSLAEELRHIHSRYRGSYWRTVRACLGCPLRRGALLLLSIYFYYSLPNAVGPPFTWMLALLGLSQALNILLGLKGLAPAEISALCEKGNFNVAHGLAWSYYIGYLRLILPELQARIRTYNQHYNNLLRGAVSQRLYILLPLDCGVPDNLSMADPNIRFLDKLPQQTGDHAGIKDRVYSNSIYELLENGQRAGTCVLEYATPLQTLFAMSQYSQAGFSREDRLEQAKLFCRTLEDILADAPESQNNCRLIAYQEPADDSSFSLSQEVLRHLRQEEKEEVTVGSLKTSAVPSTSTMSQEPELLISGMEKPLPLRTDFS

SEQ ID NO: 7 - protein, 379 aa, Artificial Sequence
  Synthetic: (Hu STING (E315Q); no epitope tag)
MPHSSLHPSIPCPRGHGAQKAALVLLSACLVTLWGLGEPPEHTLRYLVLHLASLQLGLLLNGVCSLAEELRHIHSRYRGSYWRTVRACLGCPLRRGALLLLSIYFYYSLPNAVGPPFTWMLALLGLSQALNILLGLKGLAPAEISAVCEKGNFNVAHGLAWSYYIGYLRLILPELQARIRTYNQHYNNLLRGAVSQRLYILLPLDCGVPDNLSMADPNIRFLDKLPQQTGDHAGIKDRVYSNSIYELLENGQRAGTCVLEYATPLQTLFAMSQYSQAGFSREDRLEQAKLFCRTLEDILADAPESQNNCRLIAYQQPADDSSFSLSQEVLRHLRQEEKEEVTVGSLKTSAVPSTSTMSQEPELLISGMEKPLPLRTDFS

SEQ ID NO: 8 - protein, 379 aa, Artificial Sequence
  Synthetic: (Hu STING (R375A); no epitope tag)
MPHSSLHPSIPCPRGHGAQKAALVLLSACLVTLWGLGEPPEHTLRYLVLHLASLQLGLLLNGVCSLAEELRHIHSRYRGSYWRTVRACLGCPLRRGALLLLSIYFYYSLPNAVGPPFTWMLALLGLSQALNILLGLKGLAPAEISAVCEKGNFNVAHGLAWSYYIGYLRLILPELQARIRTYNQHYNNLLRGAVSQRLYILLPLDCGVPDNLSMADPNIRFLDKLPQQTGDHAGIKDRVYSNSIYELLENGQRAGTCVLEYATPLQTLFAMSQYSQAGFSREDRLEQAKLFCRTLEDILADAPESQNNCRLIAYQEPADDSSFSLSQEVLRHLRQEEKEEVTVGSLKTSAVPSTSTMSQEPELLISGMEKPLPLATDFS

SEQ ID NO: 9 - protein, 379 aa, Artificial Sequence
  Synthetic: (Hu STING(V147L/N154S/V155M); no epitope tag)
MPHSSLHPSIPCPRGHGAQKAALVLLSACLVTLWGLGEPPEHTLRYLVLHLASLQLGLLLNGVCSLAEELRHIHSRYRGSYWRTVRACLGCPLRRGALLLLSIYFYYSLPNAVGPPFTWMLALLGLSQALNILLGLKGLAPAEISALCEKGNFSMAHGLAWSYYIGYLRLILPELQARIRTYNQHYNNLLRGAVSQRLYILLPLDCGVPDNLSMADPNIRFLDKLPQQTGDHAGIKDRVYSNSIYELLENGQRAGTCVLEYATPLQTLFAMSQYSQAGFSREDRLEQAKLFCRTLEDILADAPESQNNCRLIAYQEPADDSSFSLSQEVLRHLRQEEKEEVTVGSLKTSAVPSTSTMSQEPELLISGMEKPLPLRTDFS

SEQ ID NO: 10 - protein, 379 aa, Artificial Sequence
  Synthetic: (Hu STING(R284M/V147L/N154S/V155M); no epitope tag)
MPHSSLHPSIPCPRGHGAQKAALVLLSACLVTLWGLGEPPEHTLRYLVLHLASLQLGLLLNGVCSLAEELRHIHSRYRGSYWRTVRACLGCPLRRGALLLLSIYFYYSLPNAVGPPFTWMLALLGLSQALNILLGLKGLAPAEISALCEKGNFSMAHGLAWSYYIGYLRLILPELQARIRTYNQHYNNLLRGAVSQRLYILLPLDCGVPDNLSMADPNIRFLDKLPQQTGDHAGIKDRVYSNSIYELLENGQRAGTCVLEYATPLQTLFAMSQYSQAGFSREDMLEQAKLFCRTLEDILADAPESQNNCRLIAYQEPADDSSFSLSQEVLRHLRQEEKEEVTVGSLKTSAVPSTSTMSQEPELLISGMEKPLPLRTDFS

SEQ ID NO: 11 - protein, 419 aa, Artificial Sequence
  Synthetic: (super mouse IRF3 S396D; no epitope tag)
METPKPRILPWLVSQLDLGQLEGVAWLDESRTRFRIPWKHGLRQDAQMADFGIFQAWAEASGAYTPGKDKPDVSTWKRNFRSALNRKEVLRLAADNSKDPYDPHKVYEFVTPGARDFVHLGASPDTNGKSSLPHSQENLPKLFDGLILGPLKDEGSSDLAIVSDPSQQLPSPNVNNFLNPAPQENPLKQLLAEEQWEFEVTAFYRGRQVFQQTLFCPGGLRLVGSTADMTLPWQPVTLPDPEGFLTDKLVKEYVGQVLKGLGNGLALWQAGQCLWAQRLGHSHAFWALGEELLPDSGRGPDGEVHKDKDGAVFDLRPFVADLIAFMEGSGHSPRYTLWFCMGEMWPQDQPWVKRLVMVKVVPTCLKELLEMAREGGASSLKTVDLHIDNSQPISLTSDQYKAYLQDLVEDMDFQATGNI

SEQ ID NO: 12 - protein, 427 aa, Artificial Sequence
  Synthetic: (super human IRF3 S396D; no epitope tag)
MGTPKPRILPWLVSQLDLGQLEGVAWVNKSRTRFRIPWKHGLRQDAQQEDFGIFQAWAEATGAYVPGRDKPDLPTWKRNFRSALNRKEGLRLAEDRSKDPHDPHKIYEFVNSGVGDFSQPDTSPDTNGGGSTSDTQEDILDELLGNMVLAPLPDPGPPSLAVAPEPCPQPLRSPSLDNPTPFPNLGPSENPLKRLLVPGEEWEFEVTAFYRGRQVFQQTISCPEGLRLVGSEVGDRTLPGWPVTLPDPGMSLTDRGVMSYVRHVLSCLGGGLALWRAGQWLWAQRLGHCHTYWAVSEELLPNSGHGPDGEVPKDKEGGVFDLGPFIVDLITFTEGSGRSPRYALWFCVGESWPQDQPWTKRLVMVKVVPTCLRALVEMARVGGASSLENTVDLHIDNSHPLSLTSDQYKAYLQDLVEGMDFQGPGET

SEQ ID NO: 13 - protein, 503 aa, Artificial Sequence
  Synthetic: (Wild-type Hu IRF7 isoform A; P037 without epitope tag)
MALAPERAAPRVLFGEWLLGEISSGCYEGLQWLDEARTCFRVPWKHFARKDLSEADARIFKAWAVARGRWPPSSRGGGPPPEAETAERAGWKTNFRCALRSTRRFVMLRDNSGDPADPHKVYALSRELCWREGPGTDQTEAEAPAAVPPPQGGPPGPFLAHTHAGLQAPGPLPAPAGDKGDLLLQAVQQSCLADHLLTASWGADPVPTKAPGEGQEGLPLTGACAGGPGLPAGELYGWAVETTPSPGPQPAALTTGEAAAPESPHQAEPYLSPSPSACTAVQEPSPGALDVTIMYKGRTVLQKVVGHPSCTFLYGPPDPAVRATDPQQVAFPSPAELPDQKQLRYTEELLRHVAPGLHLELRGPQLWARRMGKCKVYWEVGGPPGSASPSTPACLLPRNCDTPIFDFRVFFQELVEFRARQRRGSPRYTIYLGFGQDLSAGRPKEKSLVLVKLEPWLCRVHLEGTQREGVSSLDSSSLSLCLSSANSLYDDIECFLMELEQPA

SEQ ID NO: 14 - protein, 503 aa, Artificial Sequence
  Synthetic: (constitutively active Hu IRF7 S477D/S479D; P033 without epitope tag)
MALAPERAAPRVLFGEWLLGEISSGCYEGLQWLDEARTCFRVPWKHFARKDLSEADARIFKAWAVARGRWPPSSRGGGPPPEAETAERAGWKTNFRCALRSTRRFVMLRDNSGDPADPHKVYALSRELCWREGPGTDQTEAEAPAAVPPPQGGPPGPFLAHTHAGLQAPGPLPAPAGDKGDLLLQAVQQSCLADHLLTASWGADPVPTKAPGEGQEGLPLTGACAGGPGLPAGELYGWAVETTPSPGPQPAALTTGEAAAPESPHQAEPYLSPSPSACTAVQEPSPGALDVTIMYKGRTVLQKVVGHPSCTFLYGPPDPAVRATDPQQVAFPSPAELPDQKQLRYTEELLRHVAPGLHLELRGPQLWARRMGKCKVYWEVGGPPGSASPSTPACLLPRNCDTPIFDFRVFFQELVEFRARQRRGSPRYTIYLGFGQDLSAGRPKEKSLVLVKLEPWLCRVHLEGTQREGVSSLDSSDLDLCLSSANSLYDDIECFLMELEQPA

SEQ ID NO: 15 - protein, 503 aa, Artificial Sequence
  Synthetic: (constitutively active Hu IRF7 S475D/S477D/L480D; P034 without epitope tag)
MALAPERAAPRVLFGEWLLGEISSGCYEGLQWLDEARTCFRVPWKHFARKDLSEADARIFKAWAVARGRWPPSSRGGGPPPEAETAERAGWKTNFRCALRSTRRFVMLRDNSGDPADPHKVYALSRELCWREGPGTDQTEAEAPAAVPPPQGGPPGPFLAHTHAGLQAPGPLPAPAGDKGDLLLQAVQQSCLADHLLTASWGADPVPTKAPGEGQEGLPLTGACAGGPGLPAGELYGWAVETTPSPGPQPAALTTGEAAAPESPHQAEPYLSPSPSACTAVQEPSPGALDVTIMYKGRTVLQKVVGHPSCTFLYGPPDPAVRATDPQQVAFPSPAELPDQKQLRYTEELLRHVAPGLHLELRGPQLWARRMGKCKVYWEVGGPPGSASPSTPACLLPRNCDTPIFDFRVFFQELVEFRARQRRGSPRYTIYLGFGQDLSAGRPKEKSLVLVKLEPWLCRVHLEGTQREGVSSLDDSDLSDCLSSANSLYDDIECFLMELEQPA

SEQ ID NO: 16 - protein, 503 aa, Artificial Sequence
  Synthetic: (constitutively active Hu IRF7 S475D/S476D/S477D/S479D/S483D/S487D; P035 without epitope tag)
MALAPERAAPRVLFGEWLLGEISSGCYEGLQWLDEARTCFRVPWKHFARKDLSEADARIFKAWAVARGRWPPSSRGGGPPPEAETAERAGWKTNFRCALRSTRRFVMLRDNSGDPADPHKVYALSRELCWREGPGTDQTEAEAPAAVPPPQGGPPGPFLAHTHAGLQAPGPLPAPAGDKGDLLLQAVQQSCLADHLLTASWGADPVPTKAPGEGQEGLPLTGACAGGPGLPAGELYGWAVETTPSPGPQPAALTTGEAAAPESPHQAEPYLSPSPSACTAVQEPSPGALDVTIMYKGRTVLQKVVGHPSCTFLYGPPDPAVRATDPQQVAFPSPAELPDQKQLRYTEELLRHVAPGLHLELRGPQLWARRMGKCKVYWEVGGPPGSASPSTPACLLPRNCDTPIFDFRVFFQELVEFRARQRRGSPRYTIYLGFGQDLSAGRPKEKSLVLVKLEPWLCRVHLEGTQREGVSSLDDDDLDLCLDSANDLYDDIECFLMELEQPA

SEQ ID NO: 17 - protein, 282 aa, Artificial Sequence
  Synthetic: (constitutively active truncated Hu IRF7 1-246 + 468-503; P032 without epitope tag)
MALAPERAAPRVLFGEWLLGEISSGCYEGLQWLDEARTCFRVPWKHFARKDLSEADARIFKAWAVARGRWPPSSRGGGPPPEAETAERAGWKTNFRCALRSTRRFVMLRDNSGDPADPHKVYALSRELCWREGPGTDQTEAEAPAAVPPPQGGPPGPFLAHTHAGLQAPGPLPAPAGDKGDLLLQAVQQSCLADHLLTASWGADPVPTKAPGEGQEGLPLTGACAGGPGLPAGELYGWAVETTPSPEGVSSLDSSSLSLCLSSANSLYDDIECFLMELEQPA

SEQ ID NO: 18 - protein, 282 aa, Artificial Sequence
  Synthetic: (constitutively active truncated Hu IRF7 1-246 + 468-503 plus S475D/S476D/S477D/S479D/S483D/S487D; P036 without epitope tag)
MALAPERAAPRVLFGEWLLGEISSGCYEGLQWLDEARTCFRVPWKHFARKDLSEADARIFKAWAVARGRWPPSSRGGGPPPEAETAERAGWKTNFRCALRSTRRFVMLRDNSGDPADPHKVYALSRELCWREGPGTDQTEAEAPAAVPPPQGGPPGPFLAHTHAGLQAPGPLPAPAGDKGDLLLQAVQQSCLADHLLTASWGADPVPTKAPGEGQEGLPLTGACAGGPGLPAGELYGWAVETTPSPEGVSSLDDDDLDLCLDSANDLYDDIECFLMELEQPA

SEQ ID NO: 19 - protein, 408 aa, Artificial Sequence
  Synthetic: (truncated Hu IRF7 1-151 + 247-503; P038 without epitope tag; null mutation)
MALAPERAAPRVLFGEWLLGEISSGCYEGLQWLDEARTCFRVPWKHFARKDLSEADARIFKAWAVARGRWPPSSRGGGPPPEAETAERAGWKTNFRCALRSTRRFVMLRDNSGDPADPHKVYALSRELCWREGPGTDQTEAEAPAAVPPPQGPQPAALTTGEAAAPESPHQAEPYLSPSPSACTAVQEPSPGALDVTIMYKGRTVLQKVVGHPSCTFLYGPPDPAVRATDPQQVAFPSPAELPDQKQLRYTEELLRHVAPGLHLELRGPQLWARRMGKCKVYWEVGGPPGSASPSTPACLLPRNCDTPIFDFRVFFQELVEFRARQRRGSPRYTIYLGFGQDLSAGRPKEKSLVLVKLEPWLCRVHLEGTQREGVSSLDSSSLSLCLSSANSLYDDIECFLMELEQPA

SEQ ID NO: 20 - protein, 353 aa, Artificial Sequence
  Synthetic: (truncated Hu IRF7 152-503; P039 without epitope tag; null mutation)
MGGPPGPFLAHTHAGLQAPGPLPAPAGDKGDLLLQAVQQSCLADHLLTASWGADPVPTKAPGEGQEGLPLTGACAGGPGLPAGELYGWAVETTPSPGPQPAALTTGEAAAPESPHQAEPYLSPSPSACTAVQEPSPGALDVTIMYKGRTVLQKVVGHPSCTFLYGPPDPAVRATDPQQVAFPSPAELPDQKQLRYTEELLRHVAPGLHLELRGPQLWARRMGKCKVYWEVGGPPGSASPSTPACLLPRNCDTPIFDFRVFFQELVEFRARQRRGSPRYTIYLGFGQDLSAGRPKEKSLVLVKLEPWLCRVHLEGTQREGVSSLDSSSLSLCLSSANSLYDDIECFLMELEQPA

SEQ ID NO: 21 - DNA, 92 bp, Artificial Sequence
  Synthetic: (5 UTR)
tcaagcttttggaccctcgtacagaagctaatacgactcactatagggaaataagagagaaaagaagagtaagaagaaatataagagccacc

SEQ ID NO: 22 - DNA, 119 bp, Artificial Sequence
  Synthetic: (3 UTR)
tgataataggctggagcctcggtggccatgcttcttgccccttgggcctccccccagcccctcctccccttcctgcacccgtacccccgtggtctttgaataaagtctgagtgggcggc

SEQ ID NO: 23 - DNA, 164 bp, Artificial Sequence
  Synthetic: (3 UTR with miR-122 and miR-142-3p sites)
tgataataggctggagcctcggtggccatgcttcttgccccttgggcccaaacaccattgtcacactccatccccccagcccctcctccccttcctccataaagtaggaaacactacatgcacccgtacccccgtggtctttgaataaagtctgagtgggcggc

SEQ ID NO: 24 - protein, 22 aa, Artificial Sequence
  Synthetic: (2A peptide amino acid sequence)
GSGATNFSLLKQAGDVEENPGP

SEQ ID NO: 25 - DNA, 66 bp, Artificial Sequence
  Synthetic: (Nucleotide sequence encoding 2A peptide)
ggaagcggagctactaacttcagcctgctgaagcaggctggagacgtggaggagaaccctggacct

SEQ ID NO: 26 - DNA, 108 bp, Artificial Sequence
  Synthetic: (Nucleotide sequence encoding 2A peptide)
tccggactcagatccggggatctcaaaattgtcgctcctgtcaaacaaactcttaactttgatttactcaaactggctggggatgtagaaagcaatccaggtccactc

SEQ ID NO: 27 - RNA, 87 nt, Artificial Sequence
  Synthetic: (miR-142)
gacagugcagucacccauaaaguagaaagcacuacuaacagcacuggaggguguaguguuuccuacuuuauggaugaguguacugug

SEQ ID NO: 28 - RNA, 23 nt, Artificial Sequence
  Synthetic: (miR-142-3p)
uguaguguuuccuacuuuaugga

SEQ ID NO: 29 - RNA, 23 nt, Artificial Sequence
  Synthetic: (miR-142-3p binding site)
uccauaaaguaggaaacacuaca

SEQ ID NO: 30 - RNA, 21 nt, Artificial Sequence
  Synthetic: (miR-142-5p)
cauaaaguagaaagcacuacu

SEQ ID NO: 31 - RNA, 21 nt, Artificial Sequence
  Synthetic: (miR-142-5p binding site)
aguagugcuuucuacuuuaug

SEQ ID NO: 32 - RNA, 22 nt, Artificial Sequence
  Synthetic: (miR-122-3p)
aacgccauuaucacacuaaaua

SEQ ID NO: 33 - RNA, 22 nt, Artificial Sequence
  Synthetic: (miR-122-5p)
uggagugugacaaugguguuug

SEQ ID NO: 34 - RNA, 22 nt, Artificial Sequence
  Synthetic: (miR-21-5p)
uagcuuaucagacugauguuga

SEQ ID NO: 35 - RNA, 21 nt, Artificial Sequence
  Synthetic: (miR-21-3p)
caacaccagucgaugggcugu

SEQ ID NO: 36 - protein, 15 aa, Artificial Sequence
  Synthetic: (HPV E6 peptide)
MHQKRTAMFQDPQER

SEQ ID NO: 37 - protein, 15 aa, Artificial Sequence
  Synthetic: (HPV E6 peptide)
RTAMFQDPQERPRKL

SEQ ID NO: 38 - protein, 15 aa, Artificial Sequence
  Synthetic: (HPV E6 peptide)
FQDPQERPRKLPQLC

SEQ ID NO: 39 - protein, 15 aa, Artificial Sequence
  Synthetic: (HPV E6 peptide)
QERPRKLPQLCTELQ

SEQ ID NO: 40 - protein, 15 aa, Artificial Sequence
  Synthetic: (HPV E6 peptide)
RKLPQLCTELQTTIH

SEQ ID NO: 41 - protein, 15 aa, Artificial Sequence
  Synthetic: (HPV E6 peptide)
QLCTELQTTIHDIIL

SEQ ID NO: 42 - protein, 15 aa, Artificial Sequence
  Synthetic: (HPV E6 peptide)
ELQTTIHDIILECVY

SEQ ID NO: 43 - protein, 15 aa, Artificial Sequence
  Synthetic: (HPV E6 peptide)
LECVYCKQQLLRRII

SEQ ID NO: 44 - protein, 15 aa, Artificial Sequence
  Synthetic: (HPV E6 peptide)
IILECVYCKQQLLRR

SEQ ID NO: 45 - protein, 15 aa, Artificial Sequence
  Synthetic: (HPV E6 peptide)
CVYCKQQLLRREVYD

SEQ ID NO: 46 - protein, 15 aa, Artificial Sequence
  Synthetic: (HPV E6 peptide)
KQQLLRREVYDFAFR

SEQ ID NO: 47 - protein, 15 aa, Artificial Sequence
  Synthetic: (HPV E6 peptide)
LRREVYDFAFRDLCI

SEQ ID NO: 48 - protein, 15 aa, Artificial Sequence
  Synthetic: (HPV E6 peptide)
VYDFAFRDLCIVYRD

SEQ ID NO: 49 - protein, 15 aa, Artificial Sequence
  Synthetic: (HPV E6 peptide)
AFRDLCIVYRDGNPY

SEQ ID NO: 50 - protein, 15 aa, Artificial Sequence
  Synthetic: (HPV E6 peptide)
LCIVYRDGNPYAVCD

SEQ ID NO: 51 - protein, 15 aa, Artificial Sequence
  Synthetic: (HPV E6 peptide)
YRDGNPYAVCDKCLK

SEQ ID NO: 52 - protein, 15 aa, Artificial Sequence
  Synthetic: (HPV E6 peptide)
NPYAVCDKCLKFYSK

SEQ ID NO: 53 - protein, 15 aa, Artificial Sequence
  Synthetic: (HPV E6 peptide)
VCDKCLKFYSKISEY

SEQ ID NO: 54 - protein, 15 aa, Artificial Sequence
  Synthetic: (HPV E6 peptide)
CLKFYSKISEYRHYC

SEQ ID NO: 55 - protein, 15 aa, Artificial Sequence
  Synthetic: (HPV E6 peptide)
YSKISEYRHYCYSLY

SEQ ID NO: 56 - protein, 15 aa, Artificial Sequence
  Synthetic: (HPV E6 peptide)
SEYRHYCYSLYGTTL

SEQ ID NO: 57 - protein, 15 aa, Artificial Sequence
  Synthetic: (HPV E6 peptide)
HYCYSLYGTTLEQQY

SEQ ID NO: 58 - protein, 15 aa, Artificial Sequence
  Synthetic: (HPV E6 peptide)
SLYGTTLEQQYNKPL

SEQ ID NO: 59 - protein, 15 aa, Artificial Sequence
  Synthetic: (HPV E6 peptide)
TTLEQQYNKPLCDLL

SEQ ID NO: 60 - protein, 15 aa, Artificial Sequence
  Synthetic: (HPV E6 peptide)
QQYNKPLCDLLIRCI

SEQ ID NO: 61 - protein, 15 aa, Artificial Sequence
  Synthetic: (HPV E6 peptide)
KPLCDLLIRCINCQK

SEQ ID NO: 62 - protein, 15 aa, Artificial Sequence
  Synthetic: (HPV E6 peptide)
DLLIRCINCQKPLCP

SEQ ID NO: 63 - protein, 15 aa, Artificial Sequence
  Synthetic: (HPV E6 peptide)
RCINCQKPLCPEEKQ

SEQ ID NO: 64 - protein, 15 aa, Artificial Sequence
  Synthetic: (HPV E6 peptide)
CQKPLCPEEKQRHLD

SEQ ID NO: 65 - protein, 15 aa, Artificial Sequence
  Synthetic: (HPV E6 peptide)
LCPEEKQRHLDKKQR

SEQ ID NO: 66 - protein, 15 aa, Artificial Sequence
  Synthetic: (HPV E6 peptide)
EKQRHLDKKQRFHNI

SEQ ID NO: 67 - protein, 15 aa, Artificial Sequence
  Synthetic: (HPV E6 peptide)
HLDKKQRFHNIRGRW

SEQ ID NO: 68 - protein, 15 aa, Artificial Sequence
  Synthetic: (HPV E6 peptide)
KQRFHNIRGRWTGRC

SEQ ID NO: 69 - protein, 15 aa, Artificial Sequence
  Synthetic: (HPV E6 peptide)
HNIRGRWTGRCMSCC

SEQ ID NO: 70 - protein, 15 aa, Artificial Sequence
  Synthetic: (HPV E6 peptide)
GRWTGRCMSCCRSSR

SEQ ID NO: 71 - protein, 15 aa, Artificial Sequence
  Synthetic: (HPV E6 peptide)
GRCMSCCRSSRTRRE

SEQ ID NO: 72 - protein, 14 aa, Artificial Sequence
  Synthetic: (HPV E6 peptide)
SCCRSSRTRRETQL

SEQ ID NO: 73 - protein, 15 aa, Artificial Sequence
  Synthetic: (HPV E7 peptide)
MHGDTPTLHEYMLDL

SEQ ID NO: 74 - protein, 15 aa, Artificial Sequence
  Synthetic: (HPV E7 peptide)
TPTLHEYMLDLQPET

SEQ ID NO: 75 - protein, 15 aa, Artificial Sequence
  Synthetic: (HPV E7 peptide)
HEYMLDLQPETTDLY

SEQ ID NO: 76 - protein, 15 aa, Artificial Sequence
  Synthetic: (HPV E7 peptide)
LDLQPETTDLYCYEQ

SEQ ID NO: 77 - protein, 15 aa, Artificial Sequence
  Synthetic: (HPV E7 peptide)
PETTDLYCYEQLNDS

SEQ ID NO: 78 - protein, 15 aa, Artificial Sequence
  Synthetic: (HPV E7 peptide)
DLYCYEQLNDSSEEE

SEQ ID NO: 79 - protein, 15 aa, Artificial Sequence
  Synthetic: (HPV E7 peptide)
YEQLNDSSEEEDEID

SEQ ID NO: 80 - protein, 15 aa, Artificial Sequence
  Synthetic: (HPV E7 peptide)
NDSSEEEDEIDGPAG

SEQ ID NO: 81 - protein, 15 aa, Artificial Sequence
  Synthetic: (HPV E7 peptide)
EEEDEIDGPAGQAEP

SEQ ID NO: 82 - protein, 15 aa, Artificial Sequence
  Synthetic: (HPV E7 peptide)
EIDGPAGQAEPDRAH

SEQ ID NO: 83 - protein, 15 aa, Artificial Sequence
  Synthetic: (HPV E7 peptide)
PAGQAEPDRAHYNIV

SEQ ID NO: 84 - protein, 15 aa, Artificial Sequence
  Synthetic: (HPV E7 peptide)
AEPDRAHYNIVTFCC

SEQ ID NO: 85 - protein, 15 aa, Artificial Sequence
  Synthetic: (HPV E7 peptide)
RAHYNIVTFCCKCDS

SEQ ID NO: 86 - protein, 15 aa, Artificial Sequence
  Synthetic: (HPV E7 peptide)
NIVTFCCKCDSTLRL

SEQ ID NO: 87 - protein, 15 aa, Artificial Sequence
  Synthetic: (HPV E7 peptide)
FCCKCDSTLRLCVQS

SEQ ID NO: 88 - protein, 15 aa, Artificial Sequence
  Synthetic: (HPV E7 peptide)
CDSTLRLCVQSTHVD

SEQ ID NO: 89 - protein, 15 aa, Artificial Sequence
  Synthetic: (HPV E7 peptide)
LRLCVQSTHVDIRTL

SEQ ID NO: 90 - protein, 15 aa, Artificial Sequence
  Synthetic: (HPV E7 peptide)
VQSTHVDIRTLEDLL

SEQ ID NO: 91 - protein, 15 aa, Artificial Sequence
  Synthetic: (HPV E7 peptide)
HVDIRTLEDLLMGTL

SEQ ID NO: 92 - protein, 15 aa, Artificial Sequence
  Synthetic: (HPV E7 peptide)
RTLEDLLMGTLGIVC

SEQ ID NO: 93 - protein, 15 aa, Artificial Sequence
  Synthetic: (HPV E7 peptide)
DLLMGTLGIVCPICS

SEQ ID NO: 94 - protein, 14 aa, Artificial Sequence
  Synthetic: (HPV E7 peptide)
GTLGIVCPICSQKP

SEQ ID NO: 95 - protein, 16 aa, Artificial Sequence
  Synthetic: (KRAS(G12D)15mer)
MKLVVVGADGVGKSAL

SEQ ID NO: 96 - protein, 16 aa, Artificial Sequence
  Synthetic: (KRAS(G12V)15mer)
MKLVVVGAVGVGKSAL

SEQ ID NO: 97 - protein, 16 aa, Artificial Sequence
  Synthetic: (KRAS(G13D)15mer)
MLVVVGAGDVGKSALT

SEQ ID NO: 98 - protein, 25 aa, Artificial Sequence
  Synthetic: (KRAS(G12D)25mer)
MTEYKLVVVGADGVGKSALTIQLIQ

SEQ ID NO: 99 - protein, 25 aa, Artificial Sequence
  Synthetic: (KRAS(G12V)25mer)
MTEYKLVVVGAVGVGKSALTIQLIQ

SEQ ID NO: 100 - protein, 25 aa, Artificial Sequence
  Synthetic: (KRAS(G13D)25mer)
MTEYKLVVVGAGDVGKSALTIQLIQ

SEQ ID NO: 101 - protein, 46 aa, Artificial Sequence
  Synthetic: (KRAS(G12D)15mer^3)
MKLVVVGADGVGKSALKLVVVGADGVGKSALKLVVVGADGVGKSAL

SEQ ID NO: 102 - protein, 46 aa, Artificial Sequence
  Synthetic: (KRAS(G12V)15mer^3)
MKLVVVGAVGVGKSALKLVVVGAVGVGKSALKLVVVGAVGVGKSAL

SEQ ID NO: 103 - protein, 46 aa, Artificial Sequence
  Synthetic: (KRAS(G13D)15mer^3)
MLVVVGAGDVGKSALTLVVVGAGDVGKSALTLVVVGAGDVGKSALT

SEQ ID NO: 104 - protein, 75 aa, Artificial Sequence
  Synthetic: (KRAS(G12D)25mer^3)
MTEYKLVVVGADGVGKSALTIQLIQMTEYKLVVVGADGVGKSALTIQLIQMTEYKLVVVGADGVGKSALTIQLIQ

SEQ ID NO: 105 - protein, 75 aa, Artificial Sequence
  Synthetic: (KRAS(G12V)25mer^3)
MTEYKLVVVGAVGVGKSALTIQLIQMTEYKLVVVGAVGVGKSALTIQLIQMTEYKLVVVGAVGVGKSALTIQLIQ

SEQ ID NO: 106 - protein, 75 aa, Artificial Sequence
  Synthetic: (KRAS(G13D)25mer^3)
MTEYKLVVVGAGDVGKSALTIQLIQMTEYKLVVVGAGDVGKSALTIQLIQMTEYKLVVVGAGDVGKSALTIQLIQ

SEQ ID NO: 107 - protein, 414 aa, Artificial Sequence
  Synthetic: (KRAS(G12D)15mer_nt.STING(V155M))
MPHSSLHPSIPCPRGHGAQKAALVLLSACLVTLWGLGEPPEHTLRYLVLHLASLQLGLLLNGVCSLAEELRHIHSRYRGSYWRTVRACLGCPLRRGALLLLSIYFYYSLPNAVGPPFTWMLALLGLSQALNILLGLKGLAPAEISAVCEKGNFNMAHGLAWSYYIGYLRLILPELQARIRTYNQHYNNLLRGAVSQRLYILLPLDCGVPDNLSMADPNIRFLDKLPQQTGDHAGIKDRVYSNSIYELLENGQRAGTCVLEYATPLQTLFAMSQYSQAGFSREDRLEQAKLFCRTLEDILADAPESQNNCRLIAYQEPADDSSFSLSQEVLRHLRQEEKEEVTVGSLKTSAVPSTSTMSQEPELLISGMEKPLPLRTDFSATNFSLLKQAGDVEENPGPMKLVVVGADGVGKSAL

SEQ ID NO: 108 - protein, 414 aa, Artificial Sequence
  Synthetic: (KRAS(G12V)15mer_nt.STING(V155M)
MPHSSLHPSIPCPRGHGAQKAALVLLSACLVTLWGLGEPPEHTLRYLVLHLASLQLGLLLNGVCSLAEELRHIHSRYRGSYWRTVRACLGCPLRRGALLLLSIYFYYSLPNAVGPPFTWMLALLGLSQALNILLGLKGLAPAEISAVCEKGNFNMAHGLAWSYYIGYLRLILPELQARIRTYNQHYNNLLRGAVSQRLYILLPLDCGVPDNLSMADPNIRFLDKLPQQTGDHAGIKDRVYSNSIYELLENGQRAGTCVLEYATPLQTLFAMSQYSQAGFSREDRLEQAKLFCRTLEDILADAPESQNNCRLIAYQEPADDSSFSLSQEVLRHLRQEEKEEVTVGSLKTSAVPSTSTMSQEPELLISGMEKPLPLRTDFSATNFSLLKQAGDVEENPGPMKLVVVGAVGVGKSAL

SEQ ID NO: 109 - protein, 414 aa, Artificial Sequence
  Synthetic: (KRAS(G13D)15mer_nt.STING(V155M)
MPHSSLHPSIPCPRGHGAQKAALVLLSACLVTLWGLGEPPEHTLRYLVLHLASLQLGLLLNGVCSLAEELRHIHSRYRGSYWRTVRACLGCPLRRGALLLLSIYFYYSLPNAVGPPFTWMLALLGLSQALNILLGLKGLAPAEISAVCEKGNFNMAHGLAWSYYIGYLRLILPELQARIRTYNQHYNNLLRGAVSQRLYILLPLDCGVPDNLSMADPNIRFLDKLPQQTGDHAGIKDRVYSNSIYELLENGQRAGTCVLEYATPLQTLFAMSQYSQAGFSREDRLEQAKLFCRTLEDILADAPESQNNCRLIAYQEPADDSSFSLSQEVLRHLRQEEKEEVTVGSLKTSAVPSTSTMSQEPELLISGMEKPLPLRTDFSATNFSLLKQAGDVEENPGPMLVVVGAGDVGKSALT

SEQ ID NO: 110 - protein, 423 aa, Artificial Sequence
  Synthetic:   (KRAS(G12D)25mer_nt.STING(V155M))
MPHSSLHPSIPCPRGHGAQKAALVLLSACLVTLWGLGEPPEHTLRYLVLHLASLQLGLLLNGVCSLAEELRHIHSRYRGSYWRTVRACLGCPLRRGALLLLSIYFYYSLPNAVGPPFTWMLALLGLSQALNILLGLKGLAPAEISAVCEKGNFNMAHGLAWSYYIGYLRLILPELQARIRTYNQHYNNLLRGAVSQRLYILLPLDCGVPDNLSMADPNIRFLDKLPQQTGDHAGIKDRVYSNSIYELLENGQRAGTCVLEYATPLQTLFAMSQYSQAGFSREDRLEQAKLFCRTLEDILADAPESQNNCRLIAYQEPADDSSFSLSQEVLRHLRQEEKEEVTVGSLKTSAVPSTSTMSQEPELLISGMEKPLPLRTDFSATNFSLLKQAGDVEENPGPMTEYKLVVVGADGVGKSALTIQLIQ

SEQ ID NO: 111 - protein, 423 aa, Artificial Sequence
  Synthetic: (KRAS(G12V)25mer_nt.STING(V155M)
MPHSSLHPSIPCPRGHGAQKAALVLLSACLVTLWGLGEPPEHTLRYLVLHLASLQLGLLLNGVCSLAEELRHIHSRYRGSYWRTVRACLGCPLRRGALLLLSIYFYYSLPNAVGPPFTWMLALLGLSQALNILLGLKGLAPAEISAVCEKGNFNMAHGLAWSYYIGYLRLILPELQARIRTYNQHYNNLLRGAVSQRLYILLPLDCGVPDNLSMADPNIRFLDKLPQQTGDHAGIKDRVYSNSIYELLENGQRAGTCVLEYATPLQTLFAMSQYSQAGFSREDRLEQAKLFCRTLEDILADAPESQNNCRLIAYQEPADDSSFSLSQEVLRHLRQEEKEEVTVGSLKTSAVPSTSTMSQEPELLISGMEKPLPLRTDFSATNFSLLKQAGDVEENPGPMTEYKLVVVGAVGVGKSALTIQLIQ

SEQ ID NO: 112 - protein, 423 aa, Artificial Sequence
  Synthetic:   (KRAS(G13D)25mer_nt.STING(V155M)
MPHSSLHPSIPCPRGHGAQKAALVLLSACLVTLWGLGEPPEHTLRYLVLHLASLQLGLLLNGVCSLAEELRHIHSRYRGSYWRTVRACLGCPLRRGALLLLSIYFYYSLPNAVGPPFTWMLALLGLSQALNILLGLKGLAPAEISAVCEKGNFNMAHGLAWSYYIGYLRLILPELQARIRTYNQHYNNLLRGAVSQRLYILLPLDCGVPDNLSMADPNIRFLDKLPQQTGDHAGIKDRVYSNSIYELLENGQRAGTCVLEYATPLQTLFAMSQYSQAGFSREDRLEQAKLFCRTLEDILADAPESQNNCRLIAYQEPADDSSFSLSQEVLRHLRQEEKEEVTVGSLKTSAVPSTSTMSQEPELLISGMEKPLPLRTDFSATNFSLLKQAGDVEENPGPMTEYKLVVVGAGDVGKSALTIQLIQ

SEQ ID NO: 113 - protein, 444 aa, Artificial Sequence
  Synthetic: (KRAS(G12D)15mer^3_nt.STING(V155M))
MPHSSLHPSIPCPRGHGAQKAALVLLSACLVTLWGLGEPPEHTLRYLVLHLASLQLGLLLNGVCSLAEELRHIHSRYRGSYWRTVRACLGCPLRRGALLLLSIYFYYSLPNAVGPPFTWMLALLGLSQALNILLGLKGLAPAEISAVCEKGNFNMAHGLAWSYYIGYLRLILPELQARIRTYNQHYNNLLRGAVSQRLYILLPLDCGVPDNLSMADPNIRFLDKLPQQTGDHAGIKDRVYSNSIYELLENGQRAGTCVLEYATPLQTLFAMSQYSQAGFSREDRLEQAKLFCRTLEDILADAPESQNNCRLIAYQEPADDSSFSLSQEVLRHLRQEEKEEVTVGSLKTSAVPSTSTMSQEPELLISGMEKPLPLRTDFSATNFSLLKQAGDVEENPGPMKLVVVGADGVGKSALKLVVVGADGVGKSALKLVVVGADGVGKSAL

SEQ ID NO: 114 - protein, 444 aa, Artificial Sequence
  Synthetic: (KRAS(G12V)15mer^3_nt.STING(V155M)
MPHSSLHPSIPCPRGHGAQKAALVLLSACLVTLWGLGEPPEHTLRYLVLHLASLQLGLLLNGVCSLAEELRHIHSRYRGSYWRTVRACLGCPLRRGALLLLSIYFYYSLPNAVGPPFTWMLALLGLSQALNILLGLKGLAPAEISAVCEKGNFNMAHGLAWSYYIGYLRLILPELQARIRTYNQHYNNLLRGAVSQRLYILLPLDCGVPDNLSMADPNIRFLDKLPQQTGDHAGIKDRVYSNSIYELLENGQRAGTCVLEYATPLQTLFAMSQYSQAGFSREDRLEQAKLFCRTLEDILADAPESQNNCRLIAYQEPADDSSFSLSQEVLRHLRQEEKEEVTVGSLKTSAVPSTSTMSQEPELLISGMEKPLPLRTDFSATNFSLLKQAGDVEENPGPMKLVVVGAVGVGKSALKLVVVGAVGVGKSALKLVVVGAVGVGKSAL

SEQ ID NO: 115 - protein, 444 aa, Artificial Sequence
  Synthetic: (KRAS(G13D)15mer^3_nt.STING(V155M)
MPHSSLHPSIPCPRGHGAQKAALVLLSACLVTLWGLGEPPEHTLRYLVLHLASLQLGLLLNGVCSLAEELRHIHSRYRGSYWRTVRACLGCPLRRGALLLLSIYFYYSLPNAVGPPFTWMLALLGLSQALNILLGLKGLAPAEISAVCEKGNFNMAHGLAWSYYIGYLRLILPELQARIRTYNQHYNNLLRGAVSQRLYILLPLDCGVPDNLSMADPNIRFLDKLPQQTGDHAGIKDRVYSNSIYELLENGQRAGTCVLEYATPLQTLFAMSQYSQAGFSREDRLEQAKLFCRTLEDILADAPESQNNCRLIAYQEPADDSSFSLSQEVLRHLRQEEKEEVTVGSLKTSAVPSTSTMSQEPELLISGMEKPLPLRTDFSATNFSLLKQAGDVEENPGPMLVVVGAGDVGKSALTLVVVGAGDVGKSALTLVVVGAGDVGKSALT

SEQ ID NO: 116 - protein, 473 aa, Artificial Sequence
  Synthetic: (KRAS(G12D)25mer^3_nt.STING(V155M))
MPHSSLHPSIPCPRGHGAQKAALVLLSACLVTLWGLGEPPEHTLRYLVLHLASLQLGLLLNGVCSLAEELRHIHSRYRGSYWRTVRACLGCPLRRGALLLLSIYFYYSLPNAVGPPFTWMLALLGLSQALNILLGLKGLAPAEISAVCEKGNFNMAHGLAWSYYIGYLRLILPELQARIRTYNQHYNNLLRGAVSQRLYILLPLDCGVPDNLSMADPNIRFLDKLPQQTGDHAGIKDRVYSNSIYELLENGQRAGTCVLEYATPLQTLFAMSQYSQAGFSREDRLEQAKLFCRTLEDILADAPESQNNCRLIAYQEPADDSSFSLSQEVLRHLRQEEKEEVTVGSLKTSAVPSTSTMSQEPELLISGMEKPLPLRTDFSATNFSLLKQAGDVEENPGPMTEYKLVVVGADGVGKSALTIQLIQMTEYKLVVVGADGVGKSALTIQLIQMTEYKLVVVGADGVGKSALTIQLIQ

SEQ ID NO: 117 - protein, 473 aa, Artificial Sequence
  Synthetic: (KRAS(G12V)25mer^3_nt.STING(V155M)
MPHSSLHPSIPCPRGHGAQKAALVLLSACLVTLWGLGEPPEHTLRYLVLHLASLQLGLLLNGVCSLAEELRHIHSRYRGSYWRTVRACLGCPLRRGALLLLSIYFYYSLPNAVGPPFTWMLALLGLSQALNILLGLKGLAPAEISAVCEKGNFNMAHGLAWSYYIGYLRLILPELQARIRTYNQHYNNLLRGAVSQRLYILLPLDCGVPDNLSMADPNIRFLDKLPQQTGDHAGIKDRVYSNSIYELLENGQRAGTCVLEYATPLQTLFAMSQYSQAGFSREDRLEQAKLFCRTLEDILADAPESQNNCRLIAYQEPADDSSFSLSQEVLRHLRQEEKEEVTVGSLKTSAVPSTSTMSQEPELLISGMEKPLPLRTDFSATNFSLLKQAGDVEENPGPMTEYKLVVVGAVGVGKSALTIQLIQMTEYKLVVVGAVGVGKSALTIQLIQMTEYKLVVVGAVGVGKSALTIQLIQ

SEQ ID NO: 118 - protein, 473 aa, Artificial Sequence
  Synthetic: (KRAS(G13D)25mer^3_nt.STING(V155M)
MPHSSLHPSIPCPRGHGAQKAALVLLSACLVTLWGLGEPPEHTLRYLVLHLASLQLGLLLNGVCSLAEELRHIHSRYRGSYWRTVRACLGCPLRRGALLLLSIYFYYSLPNAVGPPFTWMLALLGLSQALNILLGLKGLAPAEISAVCEKGNFNMAHGLAWSYYIGYLRLILPELQARIRTYNQHYNNLLRGAVSQRLYILLPLDCGVPDNLSMADPNIRFLDKLPQQTGDHAGIKDRVYSNSIYELLENGQRAGTCVLEYATPLQTLFAMSQYSQAGFSREDRLEQAKLFCRTLEDILADAPESQNNCRLIAYQEPADDSSFSLSQEVLRHLRQEEKEEVTVGSLKTSAVPSTSTMSQEPELLISGMEKPLPLRTDFSATNFSLLKQAGDVEENPGPMTEYKLVVVGAGDVGKSALTIQLIQMTEYKLVVVGAGDVGKSALTIQLIQMTEYKLVVVGAGDVGKSALTIQLIQ

SEQ ID NO: 119 - protein, 414 aa, Artificial Sequence
  Synthetic:   (KRAS(G12D)15mer_ct.STING(V155M))
MKLVVVGADGVGKSALATNFSLLKQAGDVEENPGPMPHSSLHPSIPCPRGHGAQKAALVLLSACLVTLWGLGEPPEHTLRYLVLHLASLQLGLLLNGVCSLAEELRHIHSRYRGSYWRTVRACLGCPLRRGALLLLSIYFYYSLPNAVGPPFTWMLALLGLSQALNILLGLKGLAPAEISAVCEKGNFNMAHGLAWSYYIGYLRLILPELQARIRTYNQHYNNLLRGAVSQRLYILLPLDCGVPDNLSMADPNIRFLDKLPQQTGDHAGIKDRVYSNSIYELLENGQRAGTCVLEYATPLQTLFAMSQYSQAGFSREDRLEQAKLFCRTLEDILADAPESQNNCRLIAYQEPADDSSFSLSQEVLRHLRQEEKEEVTVGSLKTSAVPSTSTMSQEPELLISGMEKPLPLRTDFS

SEQ ID NO: 120 - protein, 414 aa, Artificial Sequence
  Synthetic:   (KRAS(G12V)15mer_ct.STING(V155M)
MKLVVVGAVGVGKSALATNFSLLKQAGDVEENPGPMPHSSLHPSIPCPRGHGAQKAALVLLSACLVTLWGLGEPPEHTLRYLVLHLASLQLGLLLNGVCSLAEELRHIHSRYRGSYWRTVRACLGCPLRRGALLLLSIYFYYSLPNAVGPPFTWMLALLGLSQALNILLGLKGLAPAEISAVCEKGNFNMAHGLAWSYYIGYLRLILPELQARIRTYNQHYNNLLRGAVSQRLYILLPLDCGVPDNLSMADPNIRFLDKLPQQTGDHAGIKDRVYSNSIYELLENGQRAGTCVLEYATPLQTLFAMSQYSQAGFSREDRLEQAKLFCRTLEDILADAPESQNNCRLIAYQEPADDSSFSLSQEVLRHLRQEEKEEVTVGSLKTSAVPSTSTMSQEPELLISGMEKPLPLRTDFS

SEQ ID NO: 121 - protein, 414 aa, Artificial Sequence
  Synthetic:   (KRAS(G13D)15mer_ct.STING(V155M)
MLVVVGAGDVGKSALTATNFSLLKQAGDVEENPGPMPHSSLHPSIPCPRGHGAQKAALVLLSACLVTLWGLGEPPEHTLRYLVLHLASLQLGLLLNGVCSLAEELRHIHSRYRGSYWRTVRACLGCPLRRGALLLLSIYFYYSLPNAVGPPFTWMLALLGLSQALNILLGLKGLAPAEISAVCEKGNFNMAHGLAWSYYIGYLRLILPELQARIRTYNQHYNNLLRGAVSQRLYILLPLDCGVPDNLSMADPNIRFLDKLPQQTGDHAGIKDRVYSNSIYELLENGQRAGTCVLEYATPLQTLFAMSQYSQAGFSREDRLEQAKLFCRTLEDILADAPESQNNCRLIAYQEPADDSSFSLSQEVLRHLRQEEKEEVTVGSLKTSAVPSTSTMSQEPELLISGMEKPLPLRTDFS

SEQ ID NO: 122 - protein, 423 aa, Artificial Sequence
  Synthetic: (KRAS(G12D)25mer_ct.STING(V155M))
MTEYKLVVVGADGVGKSALTIQLIQATNFSLLKQAGDVEENPGPMPHSSLHPSIPCPRGHGAQKAALVLLSACLVTLWGLGEPPEHTLRYLVLHLASLQLGLLLNGVCSLAEELRHIHSRYRGSYWRTVRACLGCPLRRGALLLLSIYFYYSLPNAVGPPFTWMLALLGLSQALNILLGLKGLAPAEISAVCEKGNFNMAHGLAWSYYIGYLRLILPELQARIRTYNQHYNNLLRGAVSQRLYILLPLDCGVPDNLSMADPNIRFLDKLPQQTGDHAGIKDRVYSNSIYELLENGQRAGTCVLEYATPLQTLFAMSQYSQAGFSREDRLEQAKLFCRTLEDILADAPESQNNCRLIAYQEPADDSSFSLSQEVLRHLRQEEKEEVTVGSLKTSAVPSTSTMSQEPELLISGMEKPLPLRTDFS

SEQ ID NO: 123 - protein, 423 aa, Artificial Sequence
  Synthetic: (KRAS(G12V)25mer_ct.STING(V155M)
MTEYKLVVVGAVGVGKSALTIQLIQATNFSLLKQAGDVEENPGPMPHSSLHPSIPCPRGHGAQKAALVLLSACLVTLWGLGEPPEHTLRYLVLHLASLQLGLLLNGVCSLAEELRHIHSRYRGSYWRTVRACLGCPLRRGALLLLSIYFYYSLPNAVGPPFTWMLALLGLSQALNILLGLKGLAPAEISAVCEKGNFNMAHGLAWSYYIGYLRLILPELQARIRTYNQHYNNLLRGAVSQRLYILLPLDCGVPDNLSMADPNIRFLDKLPQQTGDHAGIKDRVYSNSIYELLENGQRAGTCVLEYATPLQTLFAMSQYSQAGFSREDRLEQAKLFCRTLEDILADAPESQNNCRLIAYQEPADDSSFSLSQEVLRHLRQEEKEEVTVGSLKTSAVPSTSTMSQEPELLISGMEKPLPLRTDFS

SEQ ID NO: 124 - protein, 423 aa, Artificial Sequence
  Synthetic: (KRAS(G13D)25mer_ct.STING(V155M)
MTEYKLVVVGAGDVGKSALTIQLIQATNFSLLKQAGDVEENPGPMPHSSLHPSIPCPRGHGAQKAALVLLSACLVTLWGLGEPPEHTLRYLVLHLASLQLGLLLNGVCSLAEELRHIHSRYRGSYWRTVRACLGCPLRRGALLLLSIYFYYSLPNAVGPPFTWMLALLGLSQALNILLGLKGLAPAEISAVCEKGNFNMAHGLAWSYYIGYLRLILPELQARIRTYNQHYNNLLRGAVSQRLYILLPLDCGVPDNLSMADPNIRFLDKLPQQTGDHAGIKDRVYSNSIYELLENGQRAGTCVLEYATPLQTLFAMSQYSQAGFSREDRLEQAKLFCRTLEDILADAPESQNNCRLIAYQEPADDSSFSLSQEVLRHLRQEEKEEVTVGSLKTSAVPSTSTMSQEPELLISGMEKPLPLRTDFS

SEQ ID NO: 125 - protein, 444 aa, Artificial Sequence
  Synthetic: (KRAS(G12D)15mer^3_ct.STING(V155M))
MKLVVVGADGVGKSALKLVVVGADGVGKSALKLVVVGADGVGKSALATNFSLLKQAGDVEENPGPMPHSSLHPSIPCPRGHGAQKAALVLLSACLVTLWGLGEPPEHTLRYLVLHLASLQLGLLLNGVCSLAEELRHIHSRYRGSYWRTVRACLGCPLRRGALLLLSIYFYYSLPNAVGPPFTWMLALLGLSQALNILLGLKGLAPAEISAVCEKGNFNMAHGLAWSYYIGYLRLILPELQARIRTYNQHYNNLLRGAVSQRLYILLPLDCGVPDNLSMADPNIRFLDKLPQQTGDHAGIKDRVYSNSIYELLENGQRAGTCVLEYATPLQTLFAMSQYSQAGFSREDRLEQAKLFCRTLEDILADAPESQNNCRLIAYQEPADDSSFSLSQEVLRHLRQEEKEEVTVGSLKTSAVPSTSTMSQEPELLISGMEKPLPLRTDFS

SEQ ID NO: 126 - protein, 444 aa, Artificial Sequence
  Synthetic: (KRAS(G12V)15mer^3_ct.STING(V155M)
MKLVVVGAVGVGKSALKLVVVGAVGVGKSALKLVVVGAVGVGKSALATNFSLLKQAGDVEENPGPMPHSSLHPSIPCPRGHGAQKAALVLLSACLVTLWGLGEPPEHTLRYLVLHLASLQLGLLLNGVCSLAEELRHIHSRYRGSYWRTVRACLGCPLRRGALLLLSIYFYYSLPNAVGPPFTWMLALLGLSQALNILLGLKGLAPAEISAVCEKGNFNMAHGLAWSYYIGYLRLILPELQARIRTYNQHYNNLLRGAVSQRLYILLPLDCGVPDNLSMADPNIRFLDKLPQQTGDHAGIKDRVYSNSIYELLENGQRAGTCVLEYATPLQTLFAMSQYSQAGFSREDRLEQAKLFCRTLEDILADAPESQNNCRLIAYQEPADDSSFSLSQEVLRHLRQEEKEEVTVGSLKTSAVPSTSTMSQEPELLISGMEKPLPLRTDFS

SEQ ID NO: 127 - protein, 444 aa, Artificial Sequence
  Synthetic: (KRAS(G13D)15mer^3_ct.STING(V155M)
MLVVVGAGDVGKSALTLVVVGAGDVGKSALTLVVVGAGDVGKSALTATNFSLLKQAGDVEENPGPMPHSSLHPSIPCPRGHGAQKAALVLLSACLVTLWGLGEPPEHTLRYLVLHLASLQLGLLLNGVCSLAEELRHIHSRYRGSYWRTVRACLGCPLRRGALLLLSIYFYYSLPNAVGPPFTWMLALLGLSQALNILLGLKGLAPAEISAVCEKGNFNMAHGLAWSYYIGYLRLILPELQARIRTYNQHYNNLLRGAVSQRLYILLPLDCGVPDNLSMADPNIRFLDKLPQQTGDHAGIKDRVYSNSIYELLENGQRAGTCVLEYATPLQTLFAMSQYSQAGFSREDRLEQAKLFCRTLEDILADAPESQNNCRLIAYQEPADDSSFSLSQEVLRHLRQEEKEEVTVGSLKTSAVPSTSTMSQEPELLISGMEKPLPLRTDFS

SEQ ID NO: 128 - protein, 473 aa, Artificial Sequence
  Synthetic: (KRAS(G12D)25mer^3_ct.STING(V155M))
MTEYKLVVVGADGVGKSALTIQLIQMTEYKLVVVGADGVGKSALTIQLIQMTEYKLVVVGADGVGKSALTIQLIQATNFSLLKQAGDVEENPGPMPHSSLHPSIPCPRGHGAQKAALVLLSACLVTLWGLGEPPEHTLRYLVLHLASLQLGLLLNGVCSLAEELRHIHSRYRGSYWRTVRACLGCPLRRGALLLLSIYFYYSLPNAVGPPFTWMLALLGLSQALNILLGLKGLAPAEISAVCEKGNFNMAHGLAWSYYIGYLRLILPELQARIRTYNQHYNNLLRGAVSQRLYILLPLDCGVPDNLSMADPNIRFLDKLPQQTGDHAGIKDRVYSNSIYELLENGQRAGTCVLEYATPLQTLFAMSQYSQAGFSREDRLEQAKLFCRTLEDILADAPESQNNCRLIAYQEPADDSSFSLSQEVLRHLRQEEKEEVTVGSLKTSAVPSTSTMSQEPELLISGMEKPLPLRTDFS

SEQ ID NO: 129 - protein, 473 aa, Artificial Sequence
  Synthetic: (KRAS(G12V)25mer^3_ct.STING(V155M)
MTEYKLVVVGAVGVGKSALTIQLIQMTEYKLVVVGAVGVGKSALTIQLIQMTEYKLVVVGAVGVGKSALTIQLIQATNFSLLKQAGDVEENPGPMPHSSLHPSIPCPRGHGAQKAALVLLSACLVTLWGLGEPPEHTLRYLVLHLASLQLGLLLNGVCSLAEELRHIHSRYRGSYWRTVRACLGCPLRRGALLLLSIYFYYSLPNAVGPPFTWMLALLGLSQALNILLGLKGLAPAEISAVCEKGNFNMAHGLAWSYYIGYLRLILPELQARIRTYNQHYNNLLRGAVSQRLYILLPLDCGVPDNLSMADPNIRFLDKLPQQTGDHAGIKDRVYSNSIYELLENGQRAGTCVLEYATPLQTLFAMSQYSQAGFSREDRLEQAKLFCRTLEDILADAPESQNNCRLIAYQEPADDSSFSLSQEVLRHLRQEEKEEVTVGSLKTSAVPSTSTMSQEPELLISGMEKPLPLRTDFS

SEQ ID NO: 130 - protein, 473 aa, Artificial Sequence
  Synthetic: (KRAS(G13D)25mer^3_ct.STING(V155M)
MTEYKLVVVGAGDVGKSALTIQLIQMTEYKLVVVGAGDVGKSALTIQLIQMTEYKLVVVGAGDVGKSALTIQLIQATNFSLLKQAGDVEENPGPMPHSSLHPSIPCPRGHGAQKAALVLLSACLVTLWGLGEPPEHTLRYLVLHLASLQLGLLLNGVCSLAEELRHIHSRYRGSYWRTVRACLGCPLRRGALLLLSIYFYYSLPNAVGPPFTWMLALLGLSQALNILLGLKGLAPAEISAVCEKGNFNMAHGLAWSYYIGYLRLILPELQARIRTYNQHYNNLLRGAVSQRLYILLPLDCGVPDNLSMADPNIRFLDKLPQQTGDHAGIKDRVYSNSIYELLENGQRAGTCVLEYATPLQTLFAMSQYSQAGFSREDRLEQAKLFCRTLEDILADAPESQNNCRLIAYQEPADDSSFSLSQEVLRHLRQEEKEEVTVGSLKTSAVPSTSTMSQEPELLISGMEKPLPLRTDFS

SEQ ID NO: 131 - protein, 25 aa, Artificial Sequence
  Synthetic: (KRAS(G12C)25mer)
MTEYKLVVVGACGVGKSALTIQLIQ

SEQ ID NO: 132 - protein, 75 aa, Artificial Sequence
  Synthetic: (KRAS(G12C)25mer^3)
MTEYKLVVVGACGVGKSALTIQLIQMTEYKLVVVGACGVGKSALTIQLIQMTEYKLVVVGACGVGKSALTIQLIQ

SEQ ID NO: 133 - protein, 25 aa, Artificial Sequence
  Synthetic: (KRAS(WT)25mer)
MTEYKLVVVGAGGVGKSALTIQLIQ

SEQ ID NO: 134 - protein, 296 aa, Artificial Sequence
  Synthetic: (human myd88(L265P); P4027 without epitope tag)
MSAGDPRVGSGSLDSFMFSIPLVALNVGVRRRLSLFLNPRTPVAADWTLLAEEMGFEYLEIRELETRPDPTRSLLDAWQGRSGASVGRLLELLALLDREDILKELKSRIEEDCQKYLGKQQNQESEKPLQVARVESSVPQTKELGGITTLDDPLGQTPELFDAFICYCPNDIEFVQEMIRQLEQTDYRLKLCVSDRDVLPGTCVWSIASELIEKRCRRMVVVVSDDYLQSKECDFQTKFALSLSPGVQQKRPIPIKYKAMKKDFPSILRFITICDYTNPCTKSWFWTRLAKALSLP

SEQ ID NO: 135 - protein, 296 aa, Artificial Sequence
  Synthetic: (mouse myd88(L265P); P4028 without epitope tag)
MAAGGPGAGSAAPVSSTSSLPLAALNMRVRRRLSLFLNVRTQVAADWTALAEEMDFEYLEIRQLETQADPTGRLLDAWQGRPGASVGRLLELLTKLGRDDVLLELGPSIEEDCQKYILKQQQEEAEKPLQVAAVDSSVPRTAELAGITTLDDPLGHMPERFDAFICYCPSDIQFVQEMIRQLEQTNYRLKLCVSDRDVLPGTCVWSIASELIEKRCRRMVVVVSDDYLQSKECDFQTKFALSLSPGAHQKRPIPIKYKAMKKEFPSILRFITVCDYTNPCTKSWFWTRLAKALSLP

SEQ ID NO: 136 - protein, 232 aa, Artificial Sequence
  Synthetic: (Mouse TRAM (TICAM2); P4033 without epitope tag)
MGVGKSKLDKCPLSWHKKDSVDADQDGHESDSKNSEEACLRGFVEQSSGSEPPTGEQDQPEAKGAGPEEQDEEEFLKFVILHAEDDTDEALRVQDLLQNDFGIRPGIVFAEMPCGRLHLQNLDDAVNGSAWTILLLTENFLRDTWCNFQFYTSLMNSVSRQHKYNSVIPMRPLNSPLPRERTPLALQTINALEEESQGFSTQVERIFRESVFERQQSIWKETRSVSQKQFIA

SEQ ID NO: 137 - protein, 847 aa, Artificial Sequence
  Synthetic: (STAT6 V547A/T548A); P008 with no epitope tag)
MSLWGLVSKMPPEKVQRLYVDFPQHLRHLLGDWLESQPWEFLVGSDAFCCNLASALLSDTVQHLQASVGEQGEGSTILQHISTLESIYQRDPLKLVATFRQILQGEKKAVMEQFRHLPMPFHWKQEELKFKTGLRRLQHRVGEIHLLREALQKGAEAGQVSLHSLIETPANGTGPSEALAMLLQETTGELEAAKALVLKRIQIWKRQQQLAGNGAPFEESLAPLQERCESLVDIYSQLQQEVGAAGGELEPKTRASLTGRLDEVLRTLVTSCFLVEKQPPQVLKTQTKFQAGVRFLLGLRFLGAPAKPPLVRADMVTEKQARELSVPQGPGAGAESTGEIINNTVPLENSIPGNCCSALFKNLLLKKIKRCERKGTESVTEEKCAVLFSASFTLGPGKLPIQLQALSLPLVVIVHGNQDNNAKATILWDNAFSEMDRVPFVVAERVPWEKMCETLNLKFMAEVGTNRGLLPEHFLFLAQKIFNDNSLSMEAFQHRSVSWSQFNKEILLGRGFTFWQWFDGVLDLTKRCLRSYWSDRLIIGFISKQYAASLLLNEPDGTFLLRFSDSEIGGITIAHVIRGQDGSPQIENIQPFSAKDLSIRSLGDRIRDLAQLKNLYPKKPKDEAFRSHYKPEQMGKDGRGYVPATIKMTVERDQPLPTPELQMPTMVPSYDLGMAPDSSMSMQLGPDMVPQVYPPHSHSIPPYQGLSPEESVNVLSAFQEPHLQMPPSLGQMSLPFDQPHPQGLLPCQPQEHAVSSPDPLLCSDVTMVEDSCLSQPVTAFPQGTWIGEDIFPPLLPPTEQDLTKLLLEGQGESGGGSLGAQPLLQPSHYGQSGISMSHMDLRANPSW

SEQ ID NO: 138 - protein, 847 aa, Artificial Sequence
  Synthetic: (STAT6 (S407D); P009 with no epitope tag)
MSLWGLVSKMPPEKVQRLYVDFPQHLRHLLGDWLESQPWEFLVGSDAFCCNLASALLSDTVQHLQASVGEQGEGSTILQHISTLESIYQRDPLKLVATFRQILQGEKKAVMEQFRHLPMPFHWKQEELKFKTGLRRLQHRVGEIHLLREALQKGAEAGQVSLHSLIETPANGTGPSEALAMLLQETTGELEAAKALVLKRIQIWKRQQQLAGNGAPFEESLAPLQERCESLVDIYSQLQQEVGAAGGELEPKTRASLTGRLDEVLRTLVTSCFLVEKQPPQVLKTQTKFQAGVRFLLGLRFLGAPAKPPLVRADMVTEKQARELSVPQGPGAGAESTGEIINNTVPLENSIPGNCCSALFKNLLLKKIKRCERKGTESVTEEKCAVLFSASFTLGPGKLPIQLQALDLPLVVIVHGNQDNNAKATILWDNAFSEMDRVPFVVAERVPWEKMCETLNLKFMAEVGTNRGLLPEHFLFLAQKIFNDNSLSMEAFQHRSVSWSQFNKEILLGRGFTFWQWFDGVLDLTKRCLRSYWSDRLIIGFISKQYVTSLLLNEPDGTFLLRFSDSEIGGITIAHVIRGQDGSPQIENIQPFSAKDLSIRSLGDRIRDLAQLKNLYPKKPKDEAFRSHYKPEQMGKDGRGYVPATIKMTVERDQPLPTPELQMPTMVPSYDLGMAPDSSMSMQLGPDMVPQVYPPHSHSIPPYQGLSPEESVNVLSAFQEPHLQMPPSLGQMSLPFDQPHPQGLLPCQPQEHAVSSPDPLLCSDVTMVEDSCLSQPVTAFPQGTWIGEDIFPPLLPPTEQDLTKLLLEGQGESGGGSLGAQPLLQPSHYGQSGISMSHMDLRANPSW

SEQ ID NO: 139 - protein, 847 aa, Artificial Sequence
  Synthetic: (STAT6 (S407D/V547A/T548A); P010 with no epitope tag)
MSLWGLVSKMPPEKVQRLYVDFPQHLRHLLGDWLESQPWEFLVGSDAFCCNLASALLSDTVQHLQASVGEQGEGSTILQHISTLESIYQRDPLKLVATFRQILQGEKKAVMEQFRHLPMPFHWKQEELKFKTGLRRLQHRVGEIHLLREALQKGAEAGQVSLHSLIETPANGTGPSEALAMLLQETTGELEAAKALVLKRIQIWKRQQQLAGNGAPFEESLAPLQERCESLVDIYSQLQQEVGAAGGELEPKTRASLTGRLDEVLRTLVTSCFLVEKQPPQVLKTQTKFQAGVRFLLGLRFLGAPAKPPLVRADMVTEKQARELSVPQGPGAGAESTGEIINNTVPLENSIPGNCCSALFKNLLLKKIKRCERKGTESVTEEKCAVLFSASFTLGPGKLPIQLQALDLPLVVIVHGNQDNNAKATILWDNAFSEMDRVPFVVAERVPWEKMCETLNLKFMAEVGTNRGLLPEHFLFLAQKIFNDNSLSMEAFQHRSVSWSQFNKEILLGRGFTFWQWFDGVLDLTKRCLRSYWSDRLIIGFISKQYAASLLLNEPDGTFLLRFSDSEIGGITIAHVIRGQDGSPQIENIQPFSAKDLSIRSLGDRIRDLAQLKNLYPKKPKDEAFRSHYKPEQMGKDGRGYVPATIKMTVERDQPLPTPELQMPTMVPSYDLGMAPDSSMSMQLGPDMVPQVYPPHSHSIPPYQGLSPEESVNVLSAFQEPHLQMPPSLGQMSLPFDQPHPQGLLPCQPQEHAVSSPDPLLCSDVTMVEDSCLSQPVTAFPQGTWIGEDIFPPLLPPTEQDLTKLLLEGQGESGGGSLGAQPLLQPSHYGQSGISMSHMDLRANPSW

SEQ ID NO: 140 - protein, 847 aa, Artificial Sequence
  Synthetic: (STAT6 (V547A/T548A/Y641F); P011 with no epitope tag)
MSLWGLVSKMPPEKVQRLYVDFPQHLRHLLGDWLESQPWEFLVGSDAFCCNLASALLSDTVQHLQASVGEQGEGSTILQHISTLESIYQRDPLKLVATFRQILQGEKKAVMEQFRHLPMPFHWKQEELKFKTGLRRLQHRVGEIHLLREALQKGAEAGQVSLHSLIETPANGTGPSEALAMLLQETTGELEAAKALVLKRIQIWKRQQQLAGNGAPFEESLAPLQERCESLVDIYSQLQQEVGAAGGELEPKTRASLTGRLDEVLRTLVTSCFLVEKQPPQVLKTQTKFQAGVRFLLGLRFLGAPAKPPLVRADMVTEKQARELSVPQGPGAGAESTGEIINNTVPLENSIPGNCCSALFKNLLLKKIKRCERKGTESVTEEKCAVLFSASFTLGPGKLPIQLQALSLPLVVIVHGNQDNNAKATILWDNAFSEMDRVPFVVAERVPWEKMCETLNLKFMAEVGTNRGLLPEHFLFLAQKIFNDNSLSMEAFQHRSVSWSQFNKEILLGRGFTFWQWFDGVLDLTKRCLRSYWSDRLIIGFISKQYAASLLLNEPDGTFLLRFSDSEIGGITIAHVIRGQDGSPQIENIQPFSAKDLSIRSLGDRIRDLAQLKNLYPKKPKDEAFRSHYKPEQMGKDGRGFVPATIKMTVERDQPLPTPELQMPTMVPSYDLGMAPDSSMSMQLGPDMVPQVYPPHSHSIPPYQGLSPEESVNVLSAFQEPHLQMPPSLGQMSLPFDQPHPQGLLPCQPQEHAVSSPDPLLCSDVTMVEDSCLSQPVTAFPQGTWIGEDIFPPLLPPTEQDLTKLLLEGQGESGGGSLGAQPLLQPSHYGQSGISMSHMDLRANPSW

SEQ ID NO: 141 - protein, 479 aa, Artificial Sequence
  Synthetic: (hu-cFLIP-L; P1006 without epitope tag)
SAEVIHQVEEALDTDEKEMLLFLCRDVAIDVVPPNVRDLLDILRERGKLSVGDLAELLYRVRRFDLLKRILKMDRKAVETHLLRNPHLVSDYRVLMAEIGEDLDKSDVSSLIFLMKDYMGRGKISKEKSFLDLVVELEKLNLVAPDQLDLLEKCLKNIHRIDLKTKIQKYKQSVQGAGTSYRNVLQAAIQKSLKDPSNNFRLHNGRSKEQRLKEQLGAQQEPVKKSIQESEAFLPQSIPEERYKMKSKPLGICLIIDCIGNETELLRDTFTSLGYEVQKFLHLSMHGISQILGQFACMPEHRDYDSFVCVLVSRGGSQSVYGVDQTHSGLPLHHIRRMFMGDSCPYLAGKPKMFFIQNYVVSEGQLEDSSLLEVDGPAMKNVEFKAQKRGLCTVHREADFFWSLCTADMSLLEQSHSSPSLYLQCLSQKLRQERKRPLLDLHIELNGYMYDWNSRVSAKEKYYVWLQHTLRKKLILSYT

SEQ ID NO: 142 - protein, 226 aa, Artificial Sequence
  Synthetic: (hu-cFLIP-S(1-227); P1007 without epitope tag)
SAEVIHQVEEALDTDEKEMLLFLCRDVAIDVVPPNVRDLLDILRERGKLSVGDLAELLYRVRRFDLLKRILKMDRKAVETHLLRNPHLVSDYRVLMAEIGEDLDKSDVSSLIFLMKDYMGRGKISKEKSFLDLVVELEKLNLVAPDQLDLLEKCLKNIHRIDLKTKIQKYKQSVQGAGTSYRNVLQAAIQKSLKDPSNNFRLHNGRSKEQRLKEQLGAQQEPVKKS

SEQ ID NO: 143 - protein, 195 aa, Artificial Sequence
  Synthetic: (hu-cFLIP-p22(1-198); P1008 without epitope tag)
SAEVIHQVEEALDTDEKEMLLFLCRDVAIDVVPPNVRDLLDILRERGKLSVGDLAELLYRVRRFDLLKRILKMDRKAVETHLLRNPHLVSDYRVLMAEIGEDLDKSDVSSLIFLMKDYMGRGKISKEKSFLDLVVELEKLNLVAPDQLDLLEKCLKNIHRIDLKTKIQKYKQSVQGAGTSYRNVLQAAIQKSLKD

SEQ ID NO: 144 - protein, 375 aa, Artificial Sequence
  Synthetic: (hu-cFLIP-p43(1-376); P1009 without epitope tag)
SAEVIHQVEEALDTDEKEMLLFLCRDVAIDVVPPNVRDLLDILRERGKLSVGDLAELLYRVRRFDLLKRILKMDRKAVETHLLRNPHLVSDYRVLMAEIGEDLDKSDVSSLIFLMKDYMGRGKISKEKSFLDLVVELEKLNLVAPDQLDLLEKCLKNIHRIDLKTKIQKYKQSVQGAGTSYRNVLQAAIQKSLKDPSNNFRLHNGRSKEQRLKEQLGAQQEPVKKSIQESEAFLPQSIPEERYKMKSKPLGICLIIDCIGNETELLRDTFTSLGYEVQKFLHLSMHGISQILGQFACMPEHRDYDSFVCVLVSRGGSQSVYGVDQTHSGLPLHHIRRMFMGDSCPYLAGKPKMFFIQNYVVSEGQLEDSSLLEVD

SEQ ID NO: 145 - protein, 104 aa, Artificial Sequence
  Synthetic: (hu-cFLIP-p12(377-480); P1010 without epitope tag)
GPAMKNVEFKAQKRGLCTVHREADFFWSLCTADMSLLEQSHSSPSLYLQCLSQKLRQERKRPLLDLHIELNGYMYDWNSRVSAKEKYYVWLQHTLRKKLILSYT

SEQ ID NO: 146 - protein, 756 aa, Artificial Sequence
  Synthetic: (huIKK2ca(S177E/S181E); P4005 without epitope tag)
MSWSPSLTTQTCGAWEMKERLGTGGFGNVIRWHNQETGEQIAIKQCRQELSPRNRERWCLEIQIMRRLTHPNVVAARDVPEGMQNLAPNDLPLLAMEYCQGGDLRKYLNQFENCCGLREGAILTLLSDIASALRYLHENRIIHRDLKPENIVLQQGEQRLIHKIIDLGYAKELDQGELCTEFVGTLQYLAPELLEQQKYTVTVDYWSFGTLAFECITGFRPFLPNWQPVQWHSKVRQKSEVDIVVSEDLNGTVKFSSSLPYPNNLNSVLAERLEKWLQLMLMWHPRQRGTDPTYGPNGCFKALDDILNLKLVHILNMVTGTIHTYPVTEDESLQSLKARIQQDTGIPEEDQELLQEAGLALIPDKPATQCISDGKLNEGHTLDMDLVFLFDNSKITYETQISPRPQPESVSCILQEPKRNLAFFQLRKVWGQVWHSIQTLKEDCNRLQQGQRAAMMNLLRNNSCLSKMKNSMASMSQQLKAKLDFFKTSIQIDLEKYSEQTEFGITSDKLLLAWREMEQAVELCGRENEVKLLVERMMALQTDIVDLQRSPMGRKQGGTLDDLEEQARELYRRLREKPRDQRTEGDSQEMVRLLLQAIQSFEKKVRVIYTQLSKTVVCKQKALELLPKVEEVVSLMNEDEKTVVRLQEKRQKELWNLLKIACSKVRGPVSGSPDSMNASRLSQPGQLMSQPSTASNSLPEPAKKSEELVAEAHNLCTLLENAIQDTVREQDQSFTALDWSWLQTEEEEHSCLEQAS

SEQ ID NO: 147 - protein, 70 aa, Artificial Sequence
  Synthetic: (huIKK2null(S177A/S181A); P4006 without epitope tag)
MSWSPSLTTQTCGAWEMKERLGTGGFGNVIRWHNQETGEQIAIKQCRQELSPRNRERWCLEIQIMRRLTH

SEQ ID NO: 148 - protein, 757 aa, Artificial Sequence
  Synthetic: (muIKK2ca(S177E/S181E); P4002 without epitope tag)
MSWSPSLPTQTCGAWEMKERLGTGGFGNVIRWHNQATGEQIAIKQCRQELSPKNRNRWCLEIQIMRRLNHPNVVAARDVPEGMQNLAPNDLPLLAMEYCQGGDLRRYLNQFENCCGLREGAVLTLLSDIASALRYLHENRIIHRDLKPENIVLQQGEKRLIHKIIDLGYAKELDQGELCTEFVGTLQYLAPELLEQQKYTVTVDYWSFGTLAFECITGFRPFLPNWQPVQWHSKVRQKSEVDIVVSEDLNGAVKFSSSLPFPNNLNSVLAERLEKWLQLMLMWHPRQRGTDPQYGPNGCFRALDDILNLKLVHVLNMVTGTVHTYPVTEDESLQSLKTRIQENTGILETDQELLQKAGLVLLPDKPATQCISDSKTNEGLTLDMDLVFLLDNSKINYETQITPRPPPESVSCILQEPKRNLSFFQLRKVWGQVWHSIQTLKEDCNRLQQGQRAAMMSLLRNNSCLSKMKNAMASTAQQLKAKLDFFKTSIQIDLEKYKEQTEFGITSDKLLLAWREMEQAVEQCGRENDVKHLVERMMALQTDIVDLQRSPMGRKQGGTLDDLEEQARELYRKLREKPRDQRTEGDSQEMVRLLLQAIQSFEKKVRVIYTQLSKTVVCKQKALELLPKVEEVVSLMNEDERTVVRLQEKRQKELWNLLKIACSKVRGPVSGSPDSMNVSRLSHPGQLMSQPSSACDSLPESDKKSEELVAEAHALCSRLESALQDTVKEQDRSFTTLDWSWLQMEDEERCSLEQACD

SEQ ID NO: 149 - protein, 757 aa, Artificial Sequence
  Synthetic: muIKK2null(S177A/S181A); P4003 without epitope tag)
MSWSPSLPTQTCGAWEMKERLGTGGFGNVIRWHNQATGEQIAIKQCRQELSPKNRNRWCLEIQIMRRLNHPNVVAARDVPEGMQNLAPNDLPLLAMEYCQGGDLRRYLNQFENCCGLREGAVLTLLSDIASALRYLHENRIIHRDLKPENIVLQQGEKRLIHKIIDLGYAKELDQGALCTAFVGTLQYLAPELLEQQKYTVTVDYWSFGTLAFECITGFRPFLPNWQPVQWHSKVRQKSEVDIVVSEDLNGAVKFSSSLPFPNNLNSVLAERLEKWLQLMLMWHPRQRGTDPQYGPNGCFRALDDILNLKLVHVLNMVTGTVHTYPVTEDESLQSLKTRIQENTGILETDQELLQKAGLVLLPDKPATQCISDSKTNEGLTLDMDLVFLLDNSKINYETQITPRPPPESVSCILQEPKRNLSFFQLRKVWGQVWHSIQTLKEDCNRLQQGQRAAMMSLLRNNSCLSKMKNAMASTAQQLKAKLDFFKTSIQIDLEKYKEQTEFGITSDKLLLAWREMEQAVEQCGRENDVKHLVERMMALQTDIVDLQRSPMGRKQGGTLDDLEEQARELYRKLREKPRDQRTEGDSQEMVRLLLQAIQSFEKKVRVIYTQLSKTVVCKQKALELLPKVEEVVSLMNEDERTVVRLQEKRQKELWNLLKIACSKVRGPVSGSPDSMNVSRLSHPGQLMSQPSSACDSLPESDKKSEELVAEAHALCSRLESALQDTVKEQDRSFTTLDWSWLQMEDEERCSLEQACD

SEQ ID NO: 150 - protein, 744 aa, Artificial Sequence
  Synthetic: Human constitutively active IKK alpha (PEST mutation) P.4013/4014 without epitope tag  amino acid
MERPPGLRPGAGGPWEMRERLGTGGFGNVCLYQHRELDLKIAIKSCRLELSTKNRERWCHEIQIMKKLNHANVVKACDVPEELNILIHDVPLLAMEYCSGGDLRKLLNKPENCCGLKESQILSLLSDIGSGIRYLHENKIIHRDLKPENIVLQDVGGKIIHKIIDLGYAKDVDQGELCTEFVGTLQYLAPELFENKPYTATVDYWSFGTMVFECIAGYRPFLHHLQPFTWHEKIKKKDPKCIFACEEMSGEVRFSSHLPQPNSLCSLVVEPMENWLQLMLNWDPQQRGGPVDLTLKQPRCFVLMDHILNLKIVHILNMTSAKIISFLLPPDESLHSLQSRIERETGINTGSQELLSETGISLDPRKPASQCVLDGVRGCDSYMVYLFDKSKTVYEGPFASRSLSDCVNYIVQDSKIQLPIIQLRKVWAEAVHYVSGLKEDYSRLFQGQRAAMLSLLRYNANLTKMKNTLISASQQLKAKLEFFHKSIQLDLERYSEQMTYGISSEKMLKAWKEMEEKAIHYAEVGVIGYLEDQIMSLHAEIMELQKSPYRRQGDLMESLEQRAIDLYKQLKHRPSDHSYSDSTEMVKIIVHTVQSQDRVLKELFGHLSKLLGCKQKIIDLLPKVEVALSNIKEADNTVMFMQGKRQKEIWHLLKIACTQAAARALVGAALEGAVAPQAAAWLPPAAAEHDHALACVVAPQDGEAAAQMIEENLNCLGHLAAIIHEANEEQGNSMMNLDWSWLTE

SEQ ID NO: 151 - DNA, 2232 bp, Artificial Sequence
  Synthetic: Human constitutively active IKK alpha (PEST mutation) P.4013/4014 without epitope tag - nucleotide
atggaacgcccccctggactgaggcctggagcaggaggaccctgggaaatgcgcgaacggctgggtactggtggtttcggcaacgtgtgcctctaccagcatcgggagttggacctgaagatcgccatcaagtcctgccgcctggagctgtcgaccaagaaccgggaacgctggtgtcatgaaatccagattatgaaaaagctgaaccacgctaacgtggtcaaagcttgcgacgtgcccgaagaactgaatatcctgatccacgatgtgcccctcctcgcaatggagtactgcagcggaggcgatctccggaagctgctcaacaagccggagaactgctgtggccttaaagagagccagattctgagccttctgtcggacatcggctcgggtatccgatatcttcacgagaacaagattattcacagagatctgaagccagagaacatcgtgctgcaagatgtcggaggaaagatcattcataagatcatcgacctgggatacgccaaggacgtggatcaaggcgaactgtgcaccgaattcgtgggaaccctccagtacctggccccggaactgttcgaaaacaaaccctacaccgccaccgtggactactggtcctttggaactatggtgttcgagtgtatagctggctaccggccatttctccatcacttgcagcccttcacctggcacgaaaagatcaagaagaaggaccccaagtgcattttcgcgtgcgaagagatgtcgggggaagtgcgcttctcgtcccacttgccccagcccaactccctgtgctccctggtggtcgaaccgatggaaaactggctgcaactgatgctgaactgggatcctcaacagcgcggtggaccagtggatctgactctgaagcagcccagatgcttcgtgctgatggaccatatcctgaacctcaagatcgtccacatcctgaacatgacctccgccaagatcatttccttcctcctcccgcccgatgagagcctgcactcactgcagtccagaatcgagagggaaaccggtattaacactgggtcacaggaactcctgtccgaaaccggaatctctctggaccctcgcaagccagcatcccagtgcgtcctggatggggtcaggggatgcgactcgtacatggtctacctcttcgataagtcaaagaccgtctacgagggaccctttgccagccggagcctgtcagactgcgtgaactacatcgtgcaggactctaagattcagctgccaattatccagctccggaaagtctgggcagaagcggtgcactacgtgtccggactgaaagaggactactcccggctgttccagggccagagggcagccatgctgtccctgctccgctacaacgccaacctcacgaagatgaagaacaccctgatctccgcgtcacaacaactgaaggccaagctggaattcttccacaagtccattcaattggatctggagcggtactccgagcagatgacttacggcattagctccgaaaagatgctcaaggcctggaaggagatggaggagaaggccattcattatgccgaagtgggggtgatcggatacctggaggatcagatcatgtcccttcatgccgagattatggaactccagaagtccccgtaccggaggcagggcgatttgatggagagcttggaacaacgcgccatcgacctgtacaagcagctcaagcacagaccgagcgaccactcgtactccgactcgactgagatggtgaaaattatcgtgcacaccgtgcagtcccaagaccgggtcctgaaggagctgttcggacacctgagcaagctgctggggtgcaagcaaaagatcattgaccttctgccaaaagtggaggtggccctgagcaacattaaggaagccgacaacaccgtgatgttcatgcagggcaagcggcagaaggagatctggcatcttctcaagatcgcgtgtacccaggctgcagcgagagccttggtgggcgctgccctggaaggtgccgtggcaccacaggccgctgcttggctgcctcctgctgctgctgagcacgatcacgcactggcctgcgtggtggcaccgcaggacggagaggctgccgcgcagatgatcgaggaaaacctgaactgcctgggtcacctggctgccatcatccacgaagccaacgaggagcaaggaaacagcatgatgaatctcgactggagctggctgactgag

SEQ ID NO: 152 - protein, 756 aa, Artificial Sequence
  Synthetic: Human constitutively active IKK beta (PEST mutation) P.4015/4016 without epitope tag - amino acid
MSWSPSLTTQTCGAWEMKERLGTGGFGNVIRWHNQETGEQIAIKQCRQELSPRNRERWCLEIQIMRRLTHPNVVAARDVPEGMQNLAPNDLPLLAMEYCQGGDLRKYLNQFENCCGLREGAILTLLSDIASALRYLHENRIIHRDLKPENIVLQQGEQRLIHKIIDLGYAKELDQGELCTEFVGTLQYLAPELLEQQKYTVTVDYWSFGTLAFECITGFRPFLPNWQPVQWHSKVRQKSEVDIVVSEDLNGTVKFSSSLPYPNNLNSVLAERLEKWLQLMLMWHPRQRGTDPTYGPNGCFKALDDILNLKLVHILNMVTGTIHTYPVTEDESLQSLKARIQQDTGIPEEDQELLQEAGLALIPDKPATQCISDGKLNEGHTLDMDLVFLFDNSKITYETQISPRPQPESVSCILQEPKRNLAFFQLRKVWGQVWHSIQTLKEDCNRLQQGQRAAMMNLLRNNSCLSKMKNSMASMSQQLKAKLDFFKTSIQIDLEKYSEQTEFGITSDKLLLAWREMEQAVELCGRENEVKLLVERMMALQTDIVDLQRSPMGRKQGGTLDDLEEQARELYRRLREKPRDQRTEGDSQEMVRLLLQAIQSFEKKVRVIYTQLSKTVVCKQKALELLPKVEEVVSLMNEDEKTVVRLQEKRQKELWNLLKIACSKVRGPVAGAPDAMNAARLAQPGQLMAQPATAANALPEPAKKAEELVAEAHNLCTLLENAIQDTVREQDQSFTALDWSWLQTEEEEHSCLEQAS

SEQ ID NO: 153 - DNA, 2268 bp, Artificial Sequence
  Synthetic: Human constitutively active IKK beta (PEST mutation) P.4015/4016 without epitope tag - nucleotide
atgtcgtggtccccctcacttactactcaaacttgcggcgcctgggaaatgaaggaaagactcggtaccgggggatttggaaacgtgatccggtggcacaaccaagaaaccggagagcaaattgcgatcaagcagtgtagacaggaactgagccctcggaacagagagcggtggtgcctggagattcagattatgcgccggctgacccatccgaacgtggtggctgccagggatgtcccggagggcatgcagaacctggcccctaacgacctcccactcctggccatggaatactgccagggtggcgatctgcggaagtaccttaaccaattcgaaaactgctgtggactcagggaaggggccattctgactctcttgtcggacatcgccagcgccctgagatacctccacgagaacagaatcatccatcgcgatctgaagccggagaacattgtgctgcaacagggcgaacagcggctgatccacaaaatcattgatctcggatatgccaaggaactggaccagggcgaactctgcaccgaattcgtgggcactctccagtacctggcacccgagttgctggagcagcagaagtacaccgtcaccgtcgactactggtccttcggaaccctcgcattcgaatgtatcactggcttccgccctttcctgcctaactggcagcctgtgcagtggcattcgaaggtccggcagaaatcggaggtggacatcgtggtgtccgaggatctgaacggcacagtgaagttctcctcctcactgccttaccccaacaacctcaactccgtgctggccgaacggctggaaaagtggctccagcttatgctgatgtggcatccacgccagcggggtactgatccgacctacggtccgaacgggtgcttcaaggccctggacgacatactgaacctcaagctcgtgcacatcctcaatatggtgaccggcacgatccatacttaccccgtcaccgaggacgaatcgttgcagtcactgaaggctcggatccagcaggacaccgggattcccgaagaggaccaggaacttctgcaggaagcgggactggcgttgatccccgacaagcctgccacccagtgcatctctgacgggaagctgaatgaaggtcacaccctggatatggaccttgtgttcctgttcgacaattccaagatcacctacgagactcagattagccctaggcctcagccggaatccgtgtcgtgcatcctgcaagaaccgaagcggaatctggcgttctttcaactgcggaaagtgtggggccaagtctggcacagcattcagacactgaaggaggattgcaaccggctgcagcaaggacagcgcgccgctatgatgaatctgctgcgcaacaattcctgcctctcaaaaatgaagaactccatggcctcgatgtcccagcaattgaaggccaagctggatttcttcaagacctcgatccagatcgacctggaaaagtacagcgagcagaccgagttcggaatcacctccgacaagctgctgttggcatggcgggagatggaacaagcggtggagctgtgcggacgcgaaaacgaggtcaaactgttggtggaaagaatgatggccctgcagaccgacatcgtggacctccagcgatcccctatgggccggaagcagggtggcaccctcgatgacctggaagaacaggctcgggagctgtacaggcgcctgcgggaaaagccgcgggaccagagaactgaaggggattcccaggagatggtgcgcctgctgcttcaagccatccagtcattcgaaaagaaggtccgcgtgatctacacccaactgagcaagactgtggtgtgcaagcagaaggccctcgaactgctgccgaaggtggaggaggtcgtgtccctgatgaacgaggacgaaaagacggtcgtgagactccaggaaaagagacagaaggaactgtggaaccttctcaagattgcctgctccaaagtgcgcggacctgtggctggagctcccgacgccatgaacgccgctagactcgcgcagcctggacagctcatggcccagcccgcaactgcagctaacgccctgcccgaaccagcgaagaaggcggaggagcttgtggcggaagcccacaacctgtgcaccctgctcgaaaacgccatccaggacactgtgcgggaacaagaccaatccttcaccgccctggattggtcatggctgcagactgaggaagaggagcactcctgtctggagcaagcctcc

SEQ ID NO: 154 - protein, 745 aa, Artificial Sequence
  Synthetic: Mouse constitutively active IKK alpha (PEST mutation) P.4017/4018 without epitope tag  amino acid
MERPPGLRPGAGGPWEMRERLGTGGFGNVSLYQHRELDLKIAIKSCRLELSSKNRERWCHEIQIMKKLDHANVVKACDVPEELNFLINDVPLLAMEYCSGGDLRKLLNKPENCCGLKESQILSLLSDIGSGIRYLHENKIIHRDLKPENIVLQDVGGKTIHKIIDLGYAKDVDQGELCTEFVGTLQYLAPELFENKPYTATVDYWSFGTMVFECIAGYRPFLHHLQPFTWHEKIKKKDPKCIFACEEMTGEVRFSSHLPQPNSLCSLIVEPMESWLQLMLNWDPQQRGGPIDLTLKQPRCFALMDHILNLKIVHILNMTSAKIISFLLPCDESLHSLQSRIERETGINTGSQELLSETGISLDPRKPASQCVLDGVRGCDSYMVYLFDKSKTVYEGPFASRSLSDCVNYIVQDSKIQLPIIQLRKVWAEAVHYVSGLKEDYSRLFQGQRAAMLSLLRYNANLTKMKNTLISASQQLKAKLEFFRKSIQLDLERYSEQMTYGISSEKMLKAWKEMEEKAIHYSEVGVIGYLEDQIMSLHTEIMELQKSPYGRRQGDLMESLEQRAIDLYKQLKHRPPDHLYSDSTEMVKIIVHTVQSQDRVLKELFGHLSKLLGCKQKIIDLLPKVEVALSNIKEADNTVMFMQGKRQKEIWHLLKIACTQAAARALVGAALEGAVAPPVAAWLPPALADREHPLTCVVAPQDGEALAQMIEENLNCLGHLAAIIREANEDQSSSLMSLDWSWLAE

SEQ ID NO: 155 - DNA, 2235 bp, Artificial Sequence
  Synthetic: Mouse constitutively active IKK alpha (PEST mutation) P.4017/4018 without epitope tag - nucleotide
atggaaagaccgcctggattgcgacctggagccggaggaccctgggaaatgagagagagattgggtactggaggcttcggaaatgtctcgctgtaccagcaccgcgagctcgacctgaagatcgcgatcaagtcctgtcgcctggagctgtccagcaagaacagagagcggtggtgccacgagatccagattatgaagaagctggaccatgccaacgtcgtgaaggcttgcgatgtcccggaggaactcaatttccttattaacgacgtgccgcttctcgcgatggagtactgctcaggcggcgacttgcgcaagctgcttaacaagcccgaaaactgctgcggtctgaaggaatcccaaattctgtcactcctgtccgatattggctcaggaatccgctaccttcatgagaataagatcatccaccgcgacctgaagcctgagaacattgtgctgcaggatgtcgggggaaagactatccacaagataatcgacctgggatacgccaaggacgtcgatcaaggggaactgtgcaccgaattcgtggggactctccagtacttggcccccgaactgtttgaaaacaagccctacaccgccaccgtggattactggtccttcgggactatggtgttcgagtgtattgccggctatcgcccctttctgcaccacctccagccctttacttggcacgaaaagatcaagaagaaggatccgaagtgcatcttcgcttgcgaagagatgaccggagaagtccggttttccagccatctgcctcagccgaactccctgtgttccctgattgtggaacccatggagagctggttgcagctcatgctcaactgggatccgcagcaacgcggtggcccaatcgatcttacccttaagcagcctcggtgcttcgcgctgatggaccacatcctcaatctgaagatcgtgcacatcctgaacatgacttccgccaagatcatctccttcctgctgccgtgcgacgaaagcctgcactcactgcagagccggatcgaacgggagacaggcataaacacgggatcgcaagaactgctgtccgaaaccggcatctccctggacccacggaagcctgcctcccaatgcgtcctggacggagtgcggggttgcgactcatacatggtgtacctcttcgataagtcaaagaccgtgtatgaaggacccttcgcctcccgctccctgagcgactgcgtgaactacatcgtgcaggactcgaagatccagctgccgattatccagcttcggaaggtctgggcggaggctgtgcactacgtgtccggtttgaaagaggattatagccgcctgttccagggacagagagccgccatgctgtccctcctccggtacaacgccaacctgaccaagatgaagaacaccctgatcagcgcctcgcagcagctgaaggccaagctggagttcttccggaagtcgatccagctcgacctcgaaaggtactcagaacagatgacctacggaatttcctccgagaagatgctgaaagcctggaaggaaatggaggagaaggccattcactactccgaagtgggcgtcattggctacttggaggaccaaatcatgtctctgcacaccgaaatcatggaactccagaagtcgccttacggacgacgccaaggggacctgatggagagcctggaacagcgggccatcgatctgtacaagcaactgaagcataggccgcccgaccatctctactccgactcgactgaaatggtgaagattattgtgcatacagtgcagagccaggacagagtgctgaaggagctgttcggccacctgtccaagctcctgggttgcaagcagaagattatcgatctgttgcccaaggtggaagtggccctgtctaacatcaaagaagccgacaacactgtgatgtttatgcaaggaaagcggcagaaagaaatctggcaccttctgaaaatcgcgtgcacccaggctgcagctagggcactcgtgggtgcagcgcttgaaggcgccgtggcacctcctgtcgctgcctggttgccacccgcgcttgctgacagagagcacccactgacttgtgtggtggccccacaggacggagaagcactggcccagatgattgaggagaacctgaactgtctgggacaccttgccgccattatccgggaggccaacgaggaccagtcctcgtccctgatgtccctggattggtcatggctcgctgaa

SEQ ID NO: 156 - protein, 757 aa, Artificial Sequence
  Synthetic: Mouse constitutively active IKK beta (PEST mutation) P.4019/4020 without epitope tag  amino acid
MSWSPSLPTQTCGAWEMKERLGTGGFGNVIRWHNQATGEQIAIKQCRQELSPKNRNRWCLEIQIMRRLNHPNVVAARDVPEGMQNLAPNDLPLLAMEYCQGGDLRRYLNQFENCCGLREGAVLTLLSDIASALRYLHENRIIHRDLKPENIVLQQGEKRLIHKIIDLGYAKELDQGELCTEFVGTLQYLAPELLEQQKYTVTVDYWSFGTLAFECITGFRPFLPNWQPVQWHSKVRQKSEVDIVVSEDLNGAVKFSSSLPFPNNLNSVLAERLEKWLQLMLMWHPRQRGTDPQYGPNGCFRALDDILNLKLVHVLNMVTGTVHTYPVTEDESLQSLKTRIQENTGILETDQELLQKAGLVLLPDKPATQCISDSKTNEGLTLDMDLVFLLDNSKINYETQITPRPPPESVSCILQEPKRNLSFFQLRKVWGQVWHSIQTLKEDCNRLQQGQRAAMMSLLRNNSCLSKMKNAMASTAQQLKAKLDFFKTSIQIDLEKYKEQTEFGITSDKLLLAWREMEQAVEQCGRENDVKHLVERMMALQTDIVDLQRSPMGRKQGGTLDDLEEQARELYRKLREKPRDQRTEGDSQEMVRLLLQAIQSFEKKVRVIYTQLSKTVVCKQKALELLPKVEEVVSLMNEDERTVVRLQEKRQKELWNLLKIACSKVRGPVAGAPDAMNVARLAHPGQLMAQPASACDALPESDKKAEELVAEAHALCSRLESALQDTVKEQDRSFTTLDWSWLQMEDEERCSLEQACD

SEQ ID NO: 157 - DNA, 2271 bp, Artificial Sequence
  Synthetic: Mouse constitutively active IKK beta (PEST mutation) P.4019/4020 without epitope tag - nucleotide
atgagctggagcccttcactgccaacccaaacctgtggagcctgggaaatgaaagaaagactgggaaccggaggtttcggcaacgtgatccgctggcataaccaggccactggggagcagattgccatcaagcagtgccggcaggagctgtccccgaagaaccgcaaccggtggtgcctggaaatccagatcatgcggcggcttaaccaccccaacgtggtcgccgcgagagatgtgccggagggcatgcaaaacctggcccccaacgatctcccgctgttggcgatggagtattgccagggtggcgatctgcggcgctacctgaatcaattcgagaactgctgcggtctgcgcgaaggagctgtgcttacgctgctctcggacatcgcctcggcgctgagatacctccacgaaaatcggatcatccaccgagatctcaagccggaaaacattgtgcttcagcaaggggaaaagcgcctcatccataagatcatcgatctcggctacgccaaggagttggaccagggggagctctgcactgaattcgtgggaactctgcagtacttggcgcccgaactgctggagcaacagaagtacactgtgaccgtggactactggtcctttggaaccctggccttcgagtgcattactggcttccggcctttccttccaaactggcagccggtgcagtggcactcaaaggtccgccagaagtccgaagtggacatcgtggtgtccgaggacttgaacggcgccgtgaagttctcgtcctccctgcccttcccgaacaacctcaactccgtgctggccgagaggctggaaaagtggctgcagcttatgctgatgtggcaccctagacagcgcggaactgatccgcagtacggcccgaacggctgttttagggccctggacgacattctgaacctgaaactcgtccacgtgcttaacatggtcaccggtaccgtccatacctatccggtcaccgaggacgaatccctgcagtccctcaagactcggattcaggagaataccggcattctggaaaccgaccaggagctgctgcagaaggccggactggtgctgctccccgataagcccgcaacccagtgcatctcagactccaagaccaacgagggcctgactctcgacatggacctggtgttcctgctcgacaacagcaagatcaactacgaaacccaaattacccctagaccaccacctgaatccgtgagctgcatactgcaggagcccaagcgcaacctctccttcttccaactccggaaggtctggggccaagtgtggcactccattcagactctgaaggaagattgtaacaggctgcagcagggacagagagccgccatgatgagccttctgaggaacaactcttgcctgtcaaagatgaagaacgccatggcttccaccgcgcagcagttgaaggcgaagctggacttctttaagacctccatccaaatcgacctggagaagtacaaggaacagactgagttcgggattacgagcgataaactcctgctcgcttggcgggaaatggagcaagcagtggagcagtgcggacgggagaacgacgtcaagcatctcgtggagcggatgatggcgctgcagaccgacattgtcgacttgcagcgctctccaatgggacggaagcagggagggactctggacgatctggaggaacaggcccgggaactgtacagaaagctgagggagaagccccgggatcaaagaaccgaaggagactcgcaagagatggtgcgcctgctgctgcaggcgatccagtccttcgagaagaaggtccgcgtgatctacactcagctgtccaagaccgtggtctgtaaacagaaggccctggaactgctcccgaaagtggaagaagtggtgtcgctcatgaatgaggacgagagaaccgtggtgcgcctccaagaaaagcggcagaaggaactctggaacctcctcaagattgcctgctcgaaagtgcggggacctgtggctggtgctcctgacgccatgaacgtggccaggcttgctcaccctggccaacttatggcccagcctgcatccgcctgtgacgcactgcccgagtcggacaagaaggccgaagaactggtcgccgaagcccacgcactgtgcagccgcctggaaagcgcgctgcaggacaccgtgaaggagcaggaccgcagctttaccactcttgattggtcctggctgcaaatggaggacgaagaacggtgctccctggaacaggcctgcgac

SEQ ID NO: 158 - protein, 585 aa, Artificial Sequence
  Synthetic: (huRIPK1(1-555).IZ.TM; TH1021 without epitope tag)
MQPDMSLNVIKMKSSDFLESAELDSGGFGKVSLCFHRTQGLMIMKTVYKGPNCIEHNEALLEEAKMMNRLRHSRVVKLLGVIIEEGKYSLVMEYMEKGNLMHVLKAEMSTPLSVKGRIILEIIEGMCYLHGKGVIHKDLKPENILVDNDFHIKIADLGLASFKMWSKLNNEEHNELREVDGTAKKNGGTLYYMAPEHLNDVNAKPTEKSDVYSFAVVLWAIFANKEPYENAICEQQLIMCIKSGNRPDVDDITEYCPREIISLMKLCWEANPEARPTFPGIEEKFRPFYLSQLEESVEEDVKSLKKEYSNENAVVKRMQSLQLDCVAVPSSRSNSATEQPGSLHSSQGLGMGPVEESWFAPSLEHPQEENEPSLQSKLQDEANYHLYGSRMDRQTKQQPRQNVAYNREEERRRRVSHDPFAQQRPYENFQNTEGKGTAYSSAASHGNAVHQPSGLTSQPQVLYQNNGLYSSHGFGTRPLDPGTAGPRVWYRPIPSHMPSLHNIPVPETNYLGNTPTMPFSSLPPTDESIKYTIYNSTGIQIGAYNYMEIGGTSSSGGIKKEIEAIKKEQEAIKKKIEAIEKEIEA

SEQ ID NO: 159 - protein, 609 aa, Artificial Sequence
  Synthetic: (huRIPK1(1-555).EE.DM; TH1022 without epitope tag)
MQPDMSLNVIKMKSSDFLESAELDSGGFGKVSLCFHRTQGLMIMKTVYKGPNCIEHNEALLEEAKMMNRLRHSRVVKLLGVIIEEGKYSLVMEYMEKGNLMHVLKAEMSTPLSVKGRIILEIIEGMCYLHGKGVIHKDLKPENILVDNDFHIKIADLGLASFKMWSKLNNEEHNELREVDGTAKKNGGTLYYMAPEHLNDVNAKPTEKSDVYSFAVVLWAIFANKEPYENAICEQQLIMCIKSGNRPDVDDITEYCPREIISLMKLCWEANPEARPTFPGIEEKFRPFYLSQLEESVEEDVKSLKKEYSNENAVVKRMQSLQLDCVAVPSSRSNSATEQPGSLHSSQGLGMGPVEESWFAPSLEHPQEENEPSLQSKLQDEANYHLYGSRMDRQTKQQPRQNVAYNREEERRRRVSHDPFAQQRPYENFQNTEGKGTAYSSAASHGNAVHQPSGLTSQPQVLYQNNGLYSSHGFGTRPLDPGTAGPRVWYRPIPSHMPSLHNIPVPETNYLGNTPTMPFSSLPPTDESIKYTIYNSTGIQIGAYNYMEIGGTSSSGSDGSGSGSGSITIRAAFLEKENTALRTEIAELEKEVGRCENIVSKYETRYGPL

SEQ ID NO: 160 - protein, 609 aa, Artificial Sequence
  Synthetic: (huRIPK1(1-555).RR.DM; TH1023 without epitope tag)
MQPDMSLNVIKMKSSDFLESAELDSGGFGKVSLCFHRTQGLMIMKTVYKGPNCIEHNEALLEEAKMMNRLRHSRVVKLLGVIIEEGKYSLVMEYMEKGNLMHVLKAEMSTPLSVKGRIILEIIEGMCYLHGKGVIHKDLKPENILVDNDFHIKIADLGLASFKMWSKLNNEEHNELREVDGTAKKNGGTLYYMAPEHLNDVNAKPTEKSDVYSFAVVLWAIFANKEPYENAICEQQLIMCIKSGNRPDVDDITEYCPREIISLMKLCWEANPEARPTFPGIEEKFRPFYLSQLEESVEEDVKSLKKEYSNENAVVKRMQSLQLDCVAVPSSRSNSATEQPGSLHSSQGLGMGPVEESWFAPSLEHPQEENEPSLQSKLQDEANYHLYGSRMDRQTKQQPRQNVAYNREEERRRRVSHDPFAQQRPYENFQNTEGKGTAYSSAASHGNAVHQPSGLTSQPQVLYQNNGLYSSHGFGTRPLDPGTAGPRVWYRPIPSHMPSLHNIPVPETNYLGNTPTMPFSSLPPTDESIKYTIYNSTGIQIGAYNYMEIGGTSSSGSDGSGSGSGSLEIRAAFLEKENTALRTRAAELRKRVGRCRNIVSKYETRYGPL

SEQ ID NO: 161 - protein, 585 aa, Artificial Sequence
  Synthetic: (msRIPK1(1-555).IZ.TM; TH1024 without epitope tag)
MQPDMSLDNIKMASSDLLEKTDLDSGGFGKVSLCYHRSHGFVILKKVYTGPNRAEYNEVLLEEGKMMHRLRHSRVVKLLGIIIEEGNYSLVMEYMEKGNLMHVLKTQIDVPLSLKGRIIVEAIEGMCYLHDKGVIHKDLKPENILVDRDFHIKIADLGVASFKTWSKLTKEKDNKQKEVSSTTKKNNGGTLYYMAPEHLNDINAKPTEKSDVYSFGIVLWAIFAKKEPYENVICTEQFVICIKSGNRPNVEEILEYCPREIISLMERCWQAIPEDRPTFLGIEEEFRPFYLSHFEEYVEEDVASLKKEYPDQSPVLQRMFSLQHDCVPLPPSRSNSEQPGSLHSSQGLQMGPVEESWFSSSPEYPQDENDRSVQAKLQEEASYHAFGIFAEKQTKPQPRQNEAYNREEERKRRVSHDPFAQQRARENIKSAGARGHSDPSTTSRGIAVQQLSWPATQTVWNNGLYNQHGFGTTGTGVWYPPNLSQMYSTYKTPVPETNIPGSTPTMPYFSGPVADDLIKYTIFNSSGIQIGNHNYMDVGLNSQPPNNTCKEESTSGGIKKEIEAIKKEQEAIKKKIEAIEKEIEA

SEQ ID NO: 162 - protein, 609 aa, Artificial Sequence
  Synthetic: (msRIPK1(1-555).EE.DM; TH1025 without epitope tag)
MQPDMSLDNIKMASSDLLEKTDLDSGGFGKVSLCYHRSHGFVILKKVYTGPNRAEYNEVLLEEGKMMHRLRHSRVVKLLGIIIEEGNYSLVMEYMEKGNLMHVLKTQIDVPLSLKGRIIVEAIEGMCYLHDKGVIHKDLKPENILVDRDFHIKIADLGVASFKTWSKLTKEKDNKQKEVSSTTKKNNGGTLYYMAPEHLNDINAKPTEKSDVYSFGIVLWAIFAKKEPYENVICTEQFVICIKSGNRPNVEEILEYCPREIISLMERCWQAIPEDRPTFLGIEEEFRPFYLSHFEEYVEEDVASLKKEYPDQSPVLQRMFSLQHDCVPLPPSRSNSEQPGSLHSSQGLQMGPVEESWFSSSPEYPQDENDRSVQAKLQEEASYHAFGIFAEKQTKPQPRQNEAYNREEERKRRVSHDPFAQQRARENIKSAGARGHSDPSTTSRGIAVQQLSWPATQTVWNNGLYNQHGFGTTGTGVWYPPNLSQMYSTYKTPVPETNIPGSTPTMPYFSGPVADDLIKYTIFNSSGIQIGNHNYMDVGLNSQPPNNTCKEESTSGSDGSGSGSGSITIRAAFLEKENTALRTEIAELEKEVGRCENIVSKYETRYGPL

SEQ ID NO: 163 - protein, 609 aa, Artificial Sequence
  Synthetic: (msRIPK1(1-555).RR.DM; TH1026 without epitope tag)
MQPDMSLDNIKMASSDLLEKTDLDSGGFGKVSLCYHRSHGFVILKKVYTGPNRAEYNEVLLEEGKMMHRLRHSRVVKLLGIIIEEGNYSLVMEYMEKGNLMHVLKTQIDVPLSLKGRIIVEAIEGMCYLHDKGVIHKDLKPENILVDRDFHIKIADLGVASFKTWSKLTKEKDNKQKEVSSTTKKNNGGTLYYMAPEHLNDINAKPTEKSDVYSFGIVLWAIFAKKEPYENVICTEQFVICIKSGNRPNVEEILEYCPREIISLMERCWQAIPEDRPTFLGIEEEFRPFYLSHFEEYVEEDVASLKKEYPDQSPVLQRMFSLQHDCVPLPPSRSNSEQPGSLHSSQGLQMGPVEESWFSSSPEYPQDENDRSVQAKLQEEASYHAFGIFAEKQTKPQPRQNEAYNREEERKRRVSHDPFAQQRARENIKSAGARGHSDPSTTSRGIAVQQLSWPATQTVWNNGLYNQHGFGTTGTGVWYPPNLSQMYSTYKTPVPETNIPGSTPTMPYFSGPVADDLIKYTIFNSSGIQIGNHNYMDVGLNSQPPNNTCKEESTSGSDGSGSGSGSLEIRAAFLEKENTALRTRAAELRKRVGRCRNIVSKYETRYGPL

SEQ ID NO: 164 - protein, 378 aa, Artificial Sequence
  Synthetic: (human TAK1-TAB1; P4031 without epitope tag)
MSTASAASSSSSSSAGEMIEAPSQVLNFEEIDYKEIEVEEVVGRGAFGVVCKAKWRAKDVAIKQIESESERKAFIVELRQLSRVNHPNIVKLYGACLNPVCLVMEYAEGGSLYNVLHGAEPLPYYTAAHAMSWCLQCSQGVAYLHSMQPKALIHRDLKPPNLLLVAGGTVLKICDFGTACDIQTHMTNNKGSAAWMAPEVFEGSNYSEKCDVFSWGIILWEVITRRKPFDEIGGPAFRIMWAVHNGTRPPLIKNLPKPIESLMTRCWSKDPSQRPSMEEIVKIMTHLMRYFPGADEPLQYPCQEFGGGGGQSPTLTLQSTNTHTQSSSSSSDGGLFRSRPAHSLPPGEDGRVEPYVDFAEFYRLWSVDHGEQSVVTAP

SEQ ID NO: 165 - protein, 239 aa, Artificial Sequence
  Synthetic: (Diablo.1; without epitope tag)
MAALKSWLSRSVTSFFRYRQCLCVPVVANFKKRCFSELIRPWHKTVTIGFGVTLCAVPIAQKSEPHSLSSEALMRRAVSLVTDSTSTFLSQTTYALIEAITEYTKAVYTLTSLYRQYTSLLGKMNSEEEDEVWQVIIGARAEMTSKHQEYLKLETTWMTAVGLSEMAAEAAYQTGADQASITARNHIQLVKLQVEEVHQLSRKAETKLAEAQIEELRQKTQEEGEERAESEQEAYLRED

SEQ ID NO: 166 - protein, 239 aa, Artificial Sequence
  Synthetic: (Diablo.1(S126L); without epitope tag)
MAALKSWLSRSVTSFFRYRQCLCVPVVANFKKRCFSELIRPWHKTVTIGFGVTLCAVPIAQKSEPHSLSSEALMRRAVSLVTDSTSTFLSQTTYALIEAITEYTKAVYTLTSLYRQYTSLLGKMNLEEEDEVWQVIIGARAEMTSKHQEYLKLETTWMTAVGLSEMAAEAAYQTGADQASITARNHIQLVKLQVEEVHQLSRKAETKLAEAQIEELRQKTQEEGEERAESEQEAYLRED

SEQ ID NO: 167 - protein, 185 aa, Artificial Sequence
  Synthetic: (Diablo.1(56-239); without epitope tag)
MAVPIAQKSEPHSLSSEALMRRAVSLVTDSTSTFLSQTTYALIEAITEYTKAVYTLTSLYRQYTSLLGKMNSEEEDEVWQVIIGARAEMTSKHQEYLKLETTWMTAVGLSEMAAEAAYQTGADQASITARNHIQLVKLQVEEVHQLSRKAETKLAEAQIEELRQKTQEEGEERAESEQEAYLRED

SEQ ID NO: 168 - protein, 185 aa, Artificial Sequence
  Synthetic: (Diablo.1(56-239/S126L); without epitope tag)
MAVPIAQKSEPHSLSSEALMRRAVSLVTDSTSTFLSQTTYALIEAITEYTKAVYTLTSLYRQYTSLLGKMNLEEEDEVWQVIIGARAEMTSKHQEYLKLETTWMTAVGLSEMAAEAAYQTGADQASITARNHIQLVKLQVEEVHQLSRKAETKLAEAQIEELRQKTQEEGEERAESEQEAYLRED

SEQ ID NO: 169 - protein, 195 aa, Artificial Sequence
  Synthetic: (Diablo.3; TH2003 without epitope tag)
MAALKSWLSRSVTSFFRYRQCLCVPVVANFKKRCFSELIRPWHKTVTIGFGVTLCAVPIAQAVYTLTSLYRQYTSLLGKMNSEEEDEVWQVIIGARAEMTSKHQEYLKLETTWMTAVGLSEMAAEAAYQTGADQASITARNHIQLVKLQVEEVHQLSRKAETKLAEAQIEELRQKTQEEGEERAESEQEAYLRED

SEQ ID NO: 170 - protein, 195 aa, Artificial Sequence
  Synthetic: (Diablo.3(S82L); TH2001 without epitope tag)
MAALKSWLSRSVTSFFRYRQCLCVPVVANFKKRCFSELIRPWHKTVTIGFGVTLCAVPIAQAVYTLTSLYRQYTSLLGKMNLEEEDEVWQVIIGARAEMTSKHQEYLKLETTWMTAVGLSEMAAEAAYQTGADQASITARNHIQLVKLQVEEVHQLSRKAETKLAEAQIEELRQKTQEEGEERAESEQEAYLRED

SEQ ID NO: 171 - protein, 141 aa, Artificial Sequence
  Synthetic: (Diablo.3(56-195); TH2002 without epitope tag)
MAVPIAQAVYTLTSLYRQYTSLLGKMNSEEEDEVWQVIIGARAEMTSKHQEYLKLETTWMTAVGLSEMAAEAAYQTGADQASITARNHIQLVKLQVEEVHQLSRKAETKLAEAQIEELRQKTQEEGEERAESEQEAYLRED

SEQ ID NO: 172 - protein, 141 aa, Artificial Sequence
  Synthetic: (Diablo.3(56-195/S82L); without epitope tag)
MAVPIAQAVYTLTSLYRQYTSLLGKMNLEEEDEVWQVIIGARAEMTSKHQEYLKLETTWMTAVGLSEMAAEAAYQTGADQASITARNHIQLVKLQVEEVHQLSRKAETKLAEAQIEELRQKTQEEGEERAESEQEAYLRED

SEQ ID NO: 173 - protein, 659 aa, Artificial Sequence
  Synthetic: (Btk(E41K); P4029 without epitope tag)
MAAVILESIFLKRSQQKKKTSPLNFKKRLFLLTVHKLSYYKYDFERGRRGSKKGSIDVEKITCVETVVPEKNPPPERQIPRRGEESSEMEQISIIERFPYPFQVVYDEGPLYVFSPTEELRKRWIHQLKNVIRYNSDLVQKYHPCFWIDGQYLCCSQTAKNAMGCQILENRNGSLKPGSSHRKTKKPLPPTPEEDQILKKPLPPEPAAAPVSTSELKKVVALYDYMPMNANDLQLRKGDEYFILEESNLPWWRARDKNGQEGYIPSNYVTEAEDSIEMYEWYSKHMTRSQAEQLLKQEGKEGGFIVRDSSKAGKYTVSVFAKSTGDPQGVIRHYVVCSTPQSQYYLAEKHLFSTIPELINYHQHNSAGLISRLKYPVSQQNKNAPSTAGLGYGSWEIDPKDLTFLKELGTGQFGVVKYGKWRGQYDVAIKMIKEGSMSEDEFIEEAKVMMNLSHEKLVQLYGVCTKQRPIFIITEYMANGCLLNYLREMRHRFQTQQLLEMCKDVCEAMEYLESKQFLHRDLAARNCLVNDQGVVKVSDFGLSRYVLDDEYTSSVGSKFPVRWSPPEVLMYSKFSSKSDIWAFGVLMWEIYSLGKMPYERFTNSETAEHIAQGLRLYRPHLASEKVYTIMYSCWHEKADERPTFKILLSNILDVMDEES

SEQ ID NO: 174 - protein, 225 aa, Artificial Sequence
  Synthetic: (SOCS3; P4030 without epitope tag)
MVTHSKFPAAGMSRPLDTSLRLKTFSSKSEYQLVVNAVRKLQESGFYWSAVTGGEANLLLSAEPAGTFLIRDSSDQRHFFTLSVKTQSGTKNLRIQCEGGSFSLQSDPRSTQPVPRFDCVLKLVHHYMPPPGAPSFPSPPTEPSSEVPEQPSAQPLPGSPPRRAYYIYSGGEKIPLVLSRPLSSNVATLQHLCRKTVNGHLDSYEKVTQLPGPIREFLDQYDAPL

SEQ ID NO: 175 - protein, 347 aa, Artificial Sequence
  Synthetic: (IZ_hsCASP1 (self-activating human Caspase 1); P2024 without epitope tag)
MRMKQIEDKIEEILSKIYHIENEIARIKKLIGEADQTSGNYLNMQDSQGVLSSFPAPQAVQDNPAMPTSSGSEGNVKLCSLEEAQRIWKQKSAEIYPIMDKSSRTRLALIICNEEFDSIPRRTGAEVDITGMTMLLQNLGYSVDVKKNLTASDMTTELEAFAHRPEHKTSDSTFLVFMSHGIREGICGKKHSEQVPDILQLNAIFNMLNTKNCPSLKDKPKVIIIQACRGDSPGVVWFKDSVGVSGNLSLPTTEEFEDDAIKKAHIEKDFIAFCSSTPDNVSWRHPTMGSVFIGRLIEHMQEYACSCDVEEIFRKVRFSFEQPDGRAQMPTTERVTLTRCFYLFPGH

SEQ ID NO: 176 - protein, 347 aa, Artificial Sequence
  Synthetic: (DM_hsCASP1 (self-activating human Caspase 1); P2025 without epitope tag)
MRMKQLEDKIEELLSKIYHLENEIARLKKLIGEADQTSGNYLNMQDSQGVLSSFPAPQAVQDNPAMPTSSGSEGNVKLCSLEEAQRIWKQKSAEIYPIMDKSSRTRLALIICNEEFDSIPRRTGAEVDITGMTMLLQNLGYSVDVKKNLTASDMTTELEAFAHRPEHKTSDSTFLVFMSHGIREGICGKKHSEQVPDILQLNAIFNMLNTKNCPSLKDKPKVIIIQACRGDSPGVVWFKDSVGVSGNLSLPTTEEFEDDAIKKAHIEKDFIAFCSSTPDNVSWRHPTMGSVFIGRLIEHMQEYACSCDVEEIFRKVRFSFEQPDGRAQMPTTERVTLTRCFYLFPGH

SEQ ID NO: 177 - protein, 346 aa, Artificial Sequence
  Synthetic: (IZ_mmCASP1 (self-activating mouse Caspase 1); P2026 without epitope tag)
MRMKQIEDKIEEILSKIYHIENEIARIKKLIGERSAPSAETFVATEDSKGGHPSSSETKEEQNKEDGTFPGLTGTLKFCPLEKAQKLWKENPSEIYPIMNTTTRTRLALIICNTEFQHLSPRVGAQVDLREMKLLLEDLGYTVKVKENLTALEMVKEVKEFAACPEHKTSDSTFLVFMSHGIQEGICGTTYSNEVSDILKVDTIFQMMNTLKCPSLKDKPKVIIIQACRGEKQGVVLLKDSVRDSEEDFLTDAIFEDDGIKKAHIEKDFIAFCSSTPDNVSWRHPVRGSLFIESLIKHMKEYAWSCDLEDIFRKVRFSFEQPEFRLQMPTADRVTLTKRFYLFPGH

SEQ ID NO: 178 - protein, 346 aa, Artificial Sequence
  Synthetic: (DM_mmCASP1 (self-activating mouse Caspase 1); P2027 without epitope tag)
MRMKQLEDKIEELLSKIYHLENEIARLKKLIGERSAPSAETFVATEDSKGGHPSSSETKEEQNKEDGTFPGLTGTLKFCPLEKAQKLWKENPSEIYPIMNTTTRTRLALIICNTEFQHLSPRVGAQVDLREMKLLLEDLGYTVKVKENLTALEMVKEVKEFAACPEHKTSDSTFLVFMSHGIQEGICGTTYSNEVSDILKVDTIFQMMNTLKCPSLKDKPKVIIIQACRGEKQGVVLLKDSVRDSEEDFLTDAIFEDDGIKKAHIEKDFIAFCSSTPDNVSWRHPVRGSLFIESLIKHMKEYAWSCDLEDIFRKVRFSFEQPEFRLQMPTADRVTLTKRFYLFPGH

SEQ ID NO: 179 - protein, 106 aa, Artificial Sequence
  Synthetic: (ADR concatemer with HIS tag)
MHHHHHHHHHHGKPIPNPLLGLDSTGIPVHLELASMTNMELMSSIVHQQVFPTEAGQSLVISASIIVFNLLELEGDYRGRVLELFRAAQLANDVVLQIMELCGATR

SEQ ID NO: 180 - protein, 9 aa, Artificial Sequence
  Synthetic: (KRAS G12D 9mer)
VVGADGVGK

SEQ ID NO: 181 - protein, 9 aa, Artificial Sequence
  Synthetic: (KRAS G12V 9mer)
VVGAVGVGK

SEQ ID NO: 182 - protein, 9 aa, Artificial Sequence
  Synthetic: (KRAS G13D 9mer)
VGAGDVGKS

SEQ ID NO: 183 - protein, 9 aa, Artificial Sequence
  Synthetic: (KRAS G12C 9mer)
VVGACGVGK

SEQ ID NO: 184 - protein, 15 aa, Artificial Sequence
  Synthetic: (KRAS G12C 15mer)
MKLVVVGACGVGKSA

SEQ ID NO: 185 - DNA, 75 bp, Artificial Sequence
  Synthetic: (KRAS G12D 25mer nucleotide sequence)
atgaccgagtacaagctggtggtggtgggcgccgacggcgtgggcaagagcgccctgaccatccagctgatccag

SEQ ID NO: 186 - DNA, 75 bp, Artificial Sequence
  Synthetic: (KRAS G12V 25mer nucleotide sequence)
atgaccgagtacaagctggtggtggtgggcgccgtgggcgtgggcaagagcgccctgaccatccagctgatccag

SEQ ID NO: 187 - DNA, 75 bp, Artificial Sequence
  Synthetic: (KRAS G13D 25mer nucleotide sequence)
atgaccgagtacaagctggtggtggtgggcgccggcgacgtgggcaagagcgccctgaccatccagctgatccag

SEQ ID NO: 188 - DNA, 225 bp, Artificial Sequence
  Synthetic: (KRAS G12D 25mer^3 nucleotide sequence)
atgaccgagtacaagttagtggttgtgggcgccgacggcgtgggcaagagcgccctcaccatccagcttatccagatgacggaatataagttagtagtagtgggagccgacggtgtcggcaagtccgctttgaccattcaacttattcagatgacagagtataagctggtcgttgtaggcgcagacggcgttggaaagtcggcactgacgatccagttgatccag

SEQ ID NO: 189 - DNA, 225 bp, Artificial Sequence
  Synthetic: (KRAS G12V 25mer^3 nucleotide sequence)
atgaccgagtacaagctcgtcgtggtgggcgccgtgggcgtgggcaagagcgccctaaccatccagttgatccagatgaccgaatataagctcgtggtagtcggagcggtgggcgttggcaagtcagcgctaacaatacaactaatccaaatgaccgaatacaagctagttgtagtcggtgccgtcggcgttggaaagtcagcccttacaattcagctcattcag

SEQ ID NO: 190 - DNA, 225 bp, Artificial Sequence
  Synthetic: (KRAS G13D 25mer^3 nucleotide sequence)
atgaccgagtacaagctcgtagtggttggcgccggcgacgtgggcaagagcgccctaaccatccagctcatccagatgacagaatataagcttgtggttgtgggagcaggagacgtgggaaagagtgcgttgacgattcaactcatacagatgaccgaatacaagttggtggtggtcggcgcaggtgacgttggtaagtctgcactaactatacaactgatccag

SEQ ID NO: 191 - DNA, 75 bp, Artificial Sequence
  Synthetic: (KRAS G12C 25mer nucleotide sequence)
atgaccgagtacaagctggtggtggtgggcgcctgcggcgtgggcaagagcgccctgaccatccagctgatccag

SEQ ID NO: 192 - DNA, 225 bp, Artificial Sequence
  Synthetic: (KRAS G12C 25mer^3 nucleotide sequence)
atgaccgagtacaagctcgtggttgttggcgcctgcggcgtgggcaagagcgccctcaccatccagctcatccagatgacagagtataagttagtcgttgtcggagcttgcggagttggaaagtcggcgctcaccattcaactcatacaaatgacagaatataagttagtggtggtgggtgcgtgtggcgttggcaagagtgcgcttactatccagctcattcag

SEQ ID NO: 193 - DNA, 75 bp, Artificial Sequence
  Synthetic: (KRAS WT 25mer nucleotide sequence)
atgaccgagtacaagctggtggtggtgggcgccggcggcgtgggcaagagcgccctgaccatccagctgatccag

SEQ ID NO: 194 - DNA, 47 bp, Artificial Sequence
  Synthetic: (5 UTR sequence; no promoter)
gggaaataagagagaaaagaagagtaagaagaaatataagagccacc

SEQ ID NO: 195 - protein, 75 aa, Artificial Sequence
  Synthetic: (KRAS(G12D G12V G13D) 75mer 3MUT aa. seq)
MTEYKLVVVGADGVGKSALTIQLIQMTEYKLVVVGAVGVGKSALTIQLIQMTEYKLVVVGAGDVGKSALTIQLIQ

SEQ ID NO: 196 - DNA, 225 bp, Artificial Sequence
  Synthetic: (KRAS(G12D G12V G13D) 75mer 3MUT nt. seq)
atgaccgagtacaagctcgttgtagtcggcgccgacggcgtgggcaagagcgccttgaccatccagttgatccagatgaccgaatataagttggtggtggtaggcgcagtgggagttggcaagtcagcactcacaattcagctcattcaaatgacagaatacaagttagtcgttgtaggagcaggcgacgtcggcaagagtgccttaaccattcaactaatccag

SEQ ID NO: 197 - protein, 100 aa, Artificial Sequence
  Synthetic: (KRAS(G12D G12V G13D G12C) 100mer 4MUT aa. seq)
MTEYKLVVVGADGVGKSALTIQLIQMTEYKLVVVGAVGVGKSALTIQLIQMTEYKLVVVGAGDVGKSALTIQLIQMTEYKLVVVGACGVGKSALTIQLIQ

SEQ ID NO: 198 - DNA, 300 bp, Artificial Sequence
  Synthetic: (KRAS(G12D G12V G13D G12C) 100mer 4MUT nt. seq)
atgaccgagtacaagctcgtggtcgtcggcgccgacggggtaggcaagtccgctctgaccattcagctcatccagatgacggagtacaaactcgtggtagtgggagccgtgggtgtgggcaagagcgcgctcaccatccaactcatccaaatgaccgaatataaactcgtcgtggtgggagccggcgacgtgggaaagagcgcccttaccatccagttaatccagatgacagaatacaagctggtggtggtcggtgcctgcggcgtgggtaagtccgccctgacaatccagctgatccag

SEQ ID NO: 199 - DNA, 1137 bp, Artificial Sequence
  Synthetic: (huSTING(V155M); no epitope tag; nucleotide sequence)
atgccccacagtagcctccaccccagcatcccctgccccagaggccacggcgcacagaaggccgccctggtgctgctgagcgcctgtctggtgaccctgtggggtctgggcgagccccccgagcacaccctgcggtacctcgtgctgcatctggccagcctgcagctgggcctgctgctgaacggcgtgtgcagcctggccgaagagctgagacacatccacagcagatacagaggctcctactggagaaccgtcagagcctgcctcggctgtcccctgagaagaggcgccctgctgctcctgagcatctacttctactacagcctgcccaacgccgtgggcccccccttcacctggatgctggccctgctgggcctgagccaggccctgaacatcctgctgggcctgaagggcttggcccccgccgagatctccgccgtgtgcgagaagggcaacttcaacatggcccatggccttgcctggtcctactacatcggctacctgagactgatcctgcccgagctgcaggccagaatcagaacctacaaccagcactacaacaacctgctgagaggcgccgtgagccaaagactgtacatcctgctgcccctggactgcggcgtgcccgacaaccttagcatggccgaccccaacatcagattcctggacaagctgccccagcagaccggcgaccacgccggcatcaaggacagagtgtacagcaacagcatctacgagctgctggagaacggccagagagccggcacctgcgtgctggagtacgccacccccctgcagaccctgttcgccatgagccagtacagccaggccggcttcagcagagaggacagactggagcaagccaagctgttctgcagaaccctggaggacatcctggcggacgcccccgagagccaaaacaactgcagactgatcgcctaccaggagcccgccgacgacagcagcttcagcctgagccaggaagtgctgagacacctgagacaggaagagaaggaggaggtgaccgtgggaagcctgaagaccagcgccgtgcccagcaccagcaccatgagccaggagcccgagctgctgatcagcggcatggagaagcccctgcccctgagaaccgacttcagc

SEQ ID NO: 200 - DNA, 1137 bp, Artificial Sequence
  Synthetic: (Hu STING(R284T); no epitope tag; nucleotide sequence)
atgcctcacagcagcctgcaccctagcatcccttgccctagaggccacggcgcccagaaggccgccctggtgctgctgagcgcctgcctggtgaccctgtggggcctgggcgagcctcctgagcacaccctgagatacctggtgctgcacctggccagcctgcagctgggcctgctgctgaacggcgtgtgcagcctggccgaggagctgagacacatccacagcagatacagaggcagctactggagaaccgtgagagcctgcctgggctgccctctgagaagaggcgccctgctgctgctgagcatctacttctactacagcctgcctaacgccgtgggccctcctttcacctggatgctggccctgctgggcctgagccaggccctgaacatcctgctgggcctgaagggcctggcccctgccgagatcagcgccgtgtgcgagaagggcaacttcaacgtggcccacggcctggcctggagctactacatcggctacctgagactgatcctgcctgagctgcaggccagaatcagaacctacaaccagcactacaacaacctgctgagaggcgccgtgagccagagactgtacatcctgctgcctctggactgcggcgtgcctgacaacctgagcatggccgaccctaacatcagattcctggacaagctgcctcagcagaccggcgaccacgccggcatcaaggacagagtgtacagcaacagcatctacgagctgctggagaacggccagagagccggcacctgcgtgctggagtacgccacccctctgcagaccctgttcgccatgagccagtacagccaggccggcttcagcagagaggacaccctggagcaggccaagctgttctgcagaaccctggaggacatcctggccgacgcccctgagagccagaacaactgcagactgatcgcctaccaggagcctgccgacgacagcagcttcagcctgagccaggaggtgctgagacacctgagacaggaggagaaggaggaggtgaccgtgggcagcctgaagaccagcgccgtgcctagcaccagcaccatgagccaggagcctgagctgctgatcagcggcatggagaagcctctgcctctgagaaccgacttcagc

SEQ ID NO: 201 - DNA, 1137 bp, Artificial Sequence
  Synthetic: (hu STING (R284M); no epitope tag; nucleotide sequence)
atgccccacagcagcctgcacccctccatcccctgtcccagaggccacggcgcccagaaggccgccctggtgctgctgagcgcctgcctggtgaccttatggggcctgggcgagccccccgagcacaccctgagatacctggtcctgcacctggccagcctccagctgggcctgctgctcaacggcgtgtgtagcctggccgaggagctgagacacatccacagcagatacagaggcagctactggagaaccgtgagagcctgcctgggttgcccactgagaagaggagctctgctgctgctgagcatctacttctactactcgctgcccaacgctgtgggcccccccttcacctggatgctggccctgctgggtctgagccaggccctgaacatcctcctgggcctgaagggcctggcccccgccgagataagcgccgtttgcgagaagggcaacttcaacgtggcccatggcctggcctggagctactacatcggctacttacgcctgatcctgcccgagctgcaggccagaatcagaacctacaaccagcattacaacaacctgctgagaggcgccgtgagccagagactgtatatcctgctgcccctggactgcggcgtgcccgacaacctgagcatggccgaccccaacatcagattcctggacaagctcccccagcagaccggcgaccacgccggaatcaaagacagagtgtatagcaacagcatctacgagctgctggagaacggccagagagccggcacctgcgtactggagtacgccacccccttgcagaccctgtttgccatgagccagtacagccaggccggcttcagcagagaggacatgctggagcaggccaagctgttctgcagaaccctggaggacatcctggccgacgcccccgagagccagaacaactgcagactgatcgcctaccaagagcccgccgacgacagcagcttcagcttaagccaggaggtgctgagacatctgagacaggaggagaaggaggaggtgaccgtgggcagcctcaagaccagcgctgtgccctctaccagcaccatgagccaggagcccgagctgctgatcagcggcatggagaagcccctgcccctgagaacagacttcagc

SEQ ID NO: 202 - DNA, 1137 bp, Artificial Sequence
  Synthetic: (Hu STING (R284K); no epitope tag; nucleotide sequence)
atgccccatagcagcctgcaccccagcatcccctgccccagaggccacggcgcccagaaggccgccctggtcctgctgagcgcatgcctggtcaccctgtggggcctgggcgagccccccgagcacaccctgagatacctggtgctgcacctcgccagcctgcagctgggcctgctgctgaacggcgtgtgcagcctggccgaggagctgagacacatccacagcagatatagaggcagctactggagaaccgtgagagcttgcctcggctgccccctgagaagaggcgccctgctgctgctgagcatctacttttactacagcctgcccaacgctgtgggcccccctttcacgtggatgctcgccctgctgggactgagccaggccctgaacatcctgctgggccttaagggcctagcccccgccgagatcagcgccgtgtgcgagaagggcaacttcaatgtggcccacggcctggcctggagctactacatcggctacctgagactgatcctgcccgagctgcaggccagaatcagaacctacaatcagcactacaacaacctgctgagaggcgccgtgagccagagactgtacatcctgctgcccctggactgcggcgtgcccgacaacctcagcatggccgaccccaacatcagattcctggacaagctgccccagcagaccggcgaccacgccggcatcaaggatcgcgtgtacagcaacagcatctacgagctgctggaaaacggccagagagccggaacctgcgtgctggagtacgccacacccctgcagaccctgttcgccatgagccagtacagccaggccggcttcagcagagaggacaagctggagcaggccaagctgttctgcagaaccctggaggatatcctcgccgacgcccccgagagccagaacaactgcaggctgatcgcgtaccaggagcccgctgacgacagcagctttagcctgagccaggaggtgctgagacatctgcgtcaagaggaaaaggaggaggtgaccgtgggctccctgaagaccagcgccgtgcccagcaccagcaccatgagccaggagcccgagctgctgatcagcggcatggagaagccactgcccctcagaaccgacttcagc

SEQ ID NO: 203 - DNA, 1137 bp, Artificial Sequence
  Synthetic: (Hu STING(N154S); no epitope tag; nucleotide sequence)
atgcctcacagcagcctgcaccctagcatcccttgccctagaggccacggcgcccagaaggccgccctggtgctgctgagcgcctgcctggtgaccctgtggggcctgggcgagcctcctgagcacaccctgagatacctggtgctgcacctggccagcctgcagctgggcctgctgctgaacggcgtgtgcagcctggccgaggagctgagacacatccacagcagatacagaggcagctactggagaaccgtgagagcctgcctgggctgccctctgagaagaggcgccctgctgctgctgagcatctacttctactacagcctgcctaacgccgtgggccctcctttcacctggatgctggccctgctgggcctgagccaggccctgaacatcctgctgggcctgaagggcctggcccctgccgagatcagcgccgtgtgcgagaagggcaacttcagcgtggcccacggcctggcctggagctactacatcggctacctgagactgatcctgcctgagctgcaggccagaatcagaacctacaaccagcactacaacaacctgctgagaggcgccgtgagccagagactgtacatcctgctgcctctggactgcggcgtgcctgacaacctgagcatggccgaccctaacatcagattcctggacaagctgcctcagcagaccggcgaccacgccggcatcaaggacagagtgtacagcaacagcatctacgagctgctggagaacggccagagagccggcacctgcgtgctggagtacgccacccctctgcagaccctgttcgccatgagccagtacagccaggccggcttcagcagagaggacagactggagcaggccaagctgttctgcagaaccctggaggacatcctggccgacgcccctgagagccagaacaactgcagactgatcgcctaccaggagcctgccgacgacagcagcttcagcctgagccaggaggtgctgagacacctgagacaggaggagaaggaggaggtgaccgtgggcagcctgaagaccagcgccgtgcctagcaccagcaccatgagccaggagcctgagctgctgatcagcggcatggagaagcctctgcctctgagaaccgacttcagc

SEQ ID NO: 204 - DNA, 1137 bp, Artificial Sequence
  Synthetic: (Hu STING(V147L); no epitope tag; nucleotide sequence)
atgcctcacagcagcctgcaccctagcatcccttgccctagaggccacggcgcccagaaggccgccctggtgctgctgagcgcctgcctggtgaccctgtggggcctgggcgagcctcctgagcacaccctgagatacctggtgctgcacctggccagcctgcagctgggcctgctgctgaacggcgtgtgcagcctggccgaggagctgagacacatccacagcagatacagaggcagctactggagaaccgtgagagcctgcctgggctgccctctgagaagaggcgccctgctgctgctgagcatctacttctactacagcctgcctaacgccgtgggccctcctttcacctggatgctggccctgctgggcctgagccaggccctgaacatcctgctgggcctgaagggcctggcccctgccgagatcagcgccctgtgcgagaagggcaacttcaacgtggcccacggcctggcctggagctactacatcggctacctgagactgatcctgcctgagctgcaggccagaatcagaacctacaaccagcactacaacaacctgctgagaggcgccgtgagccagagactgtacatcctgctgcctctggactgcggcgtgcctgacaacctgagcatggccgaccctaacatcagattcctggacaagctgcctcagcagaccggcgaccacgccggcatcaaggacagagtgtacagcaacagcatctacgagctgctggagaacggccagagagccggcacctgcgtgctggagtacgccacccctctgcagaccctgttcgccatgagccagtacagccaggccggcttcagcagagaggacagactggagcaggccaagctgttctgcagaaccctggaggacatcctggccgacgcccctgagagccagaacaactgcagactgatcgcctaccaggagcctgccgacgacagcagcttcagcctgagccaggaggtgctgagacacctgagacaggaggagaaggaggaggtgaccgtgggcagcctgaagaccagcgccgtgcctagcaccagcaccatgagccaggagcctgagctgctgatcagcggcatggagaagcctctgcctctgagaaccgacttcagc

SEQ ID NO: 205 - DNA, 1137 bp, Artificial Sequence
  Synthetic: (Hu STING (E315Q); no epitope tag; nucleotide sequence)
atgcctcacagcagcctgcaccctagcatcccttgccctagaggccacggcgcccagaaggccgccctggtgctgctgagcgcctgcctggtgaccctgtggggcctgggcgagcctcctgagcacaccctgagatacctggtgctgcacctggccagcctgcagctgggcctgctgctgaacggcgtgtgcagcctggccgaggagctgagacacatccacagcagatacagaggcagctactggagaaccgtgagagcctgcctgggctgccctctgagaagaggcgccctgctgctgctgagcatctacttctactacagcctgcctaacgccgtgggccctcctttcacctggatgctggccctgctgggcctgagccaggccctgaacatcctgctgggcctgaagggcctggcccctgccgagatcagcgccgtgtgcgagaagggcaacttcaacgtggcccacggcctggcctggagctactacatcggctacctgagactgatcctgcctgagctgcaggccagaatcagaacctacaaccagcactacaacaacctgctgagaggcgccgtgagccagagactgtacatcctgctgcctctggactgcggcgtgcctgacaacctgagcatggccgaccctaacatcagattcctggacaagctgcctcagcagaccggcgaccacgccggcatcaaggacagagtgtacagcaacagcatctacgagctgctggagaacggccagagagccggcacctgcgtgctggagtacgccacccctctgcagaccctgttcgccatgagccagtacagccaggccggcttcagcagagaggacagactggagcaggccaagctgttctgcagaaccctggaggacatcctggccgacgcccctgagagccagaacaactgcagactgatcgcctaccagcagcctgccgacgacagcagcttcagcctgagccaggaggtgctgagacacctgagacaggaggagaaggaggaggtgaccgtgggcagcctgaagaccagcgccgtgcctagcaccagcaccatgagccaggagcctgagctgctgatcagcggcatggagaagcctctgcctctgagaaccgacttcagc

SEQ ID NO: 206 - DNA, 1137 bp, Artificial Sequence
  Synthetic: (Hu STING (R375A); no epitope tag; nucleotide sequence)
atgcctcacagcagcctgcaccctagcatcccttgccctagaggccacggcgcccagaaggccgccctggtgctgctgagcgcctgcctggtgaccctgtggggcctgggcgagcctcctgagcacaccctgagatacctggtgctgcacctggccagcctgcagctgggcctgctgctgaacggcgtgtgcagcctggccgaggagctgagacacatccacagcagatacagaggcagctactggagaaccgtgagagcctgcctgggctgccctctgagaagaggcgccctgctgctgctgagcatctacttctactacagcctgcctaacgccgtgggccctcctttcacctggatgctggccctgctgggcctgagccaggccctgaacatcctgctgggcctgaagggcctggcccctgccgagatcagcgccgtgtgcgagaagggcaacttcaacgtggcccacggcctggcctggagctactacatcggctacctgagactgatcctgcctgagctgcaggccagaatcagaacctacaaccagcactacaacaacctgctgagaggcgccgtgagccagagactgtacatcctgctgcctctggactgcggcgtgcctgacaacctgagcatggccgaccctaacatcagattcctggacaagctgcctcagcagaccggcgaccacgccggcatcaaggacagagtgtacagcaacagcatctacgagctgctggagaacggccagagagccggcacctgcgtgctggagtacgccacccctctgcagaccctgttcgccatgagccagtacagccaggccggcttcagcagagaggacagactggagcaggccaagctgttctgcagaaccctggaggacatcctggccgacgcccctgagagccagaacaactgcagactgatcgcctaccaggagcctgccgacgacagcagcttcagcctgagccaggaggtgctgagacacctgagacaggaggagaaggaggaggtgaccgtgggcagcctgaagaccagcgccgtgcctagcaccagcaccatgagccaggagcctgagctgctgatcagcggcatggagaagcctctgcctctggccaccgacttcagc

SEQ ID NO: 207 - DNA, 1137 bp, Artificial Sequence
  Synthetic: (Hu STING(V147L/N154S/V155M); no epitope tag; nucleotide sequence)
atgcctcacagcagcctgcaccctagcatcccttgccctagaggccacggcgcccagaaggccgccctggtgctgctgagcgcctgcctggtgaccctgtggggcctgggcgagcctcctgagcacaccctgagatacctggtgctgcacctggccagcctgcagctgggcctgctgctgaacggcgtgtgcagcctggccgaggagctgagacacatccacagcagatacagaggcagctactggagaaccgtgagagcctgcctgggctgccctctgagaagaggcgccctgctgctgctgagcatctacttctactacagcctgcctaacgccgtgggccctcctttcacctggatgctggccctgctgggcctgagccaggccctgaacatcctgctgggcctgaagggcctggcccctgccgagatcagcgccctgtgcgagaagggcaacttcagcatggcccacggcctggcctggagctactacatcggctacctgagactgatcctgcctgagctgcaggccagaatcagaacctacaaccagcactacaacaacctgctgagaggcgccgtgagccagagactgtacatcctgctgcctctggactgcggcgtgcctgacaacctgagcatggccgaccctaacatcagattcctggacaagctgcctcagcagaccggcgaccacgccggcatcaaggacagagtgtacagcaacagcatctacgagctgctggagaacggccagagagccggcacctgcgtgctggagtacgccacccctctgcagaccctgttcgccatgagccagtacagccaggccggcttcagcagagaggacagactggagcaggccaagctgttctgcagaaccctggaggacatcctggccgacgcccctgagagccagaacaactgcagactgatcgcctaccaggagcctgccgacgacagcagcttcagcctgagccaggaggtgctgagacacctgagacaggaggagaaggaggaggtgaccgtgggcagcctgaagaccagcgccgtgcctagcaccagcaccatgagccaggagcctgagctgctgatcagcggcatggagaagcctctgcctctgagaaccgacttcagc

SEQ ID NO: 208 - DNA, 1137 bp, Artificial Sequence
  Synthetic: (Hu STING(R284M/V147L/N154S/V155M); no epitope tag; nucleotide sequence)
atgcctcacagcagcctgcaccctagcatcccttgccctagaggccacggcgcccagaaggccgccctggtgctgctgagcgcctgcctggtgaccctgtggggcctgggcgagcctcctgagcacaccctgagatacctggtgctgcacctggccagcctgcagctgggcctgctgctgaacggcgtgtgcagcctggccgaggagctgagacacatccacagcagatacagaggcagctactggagaaccgtgagagcctgcctgggctgccctctgagaagaggcgccctgctgctgctgagcatctacttctactacagcctgcctaacgccgtgggccctcctttcacctggatgctggccctgctgggcctgagccaggccctgaacatcctgctgggcctgaagggcctggcccctgccgagatcagcgccctgtgcgagaagggcaacttcagcatggcccacggcctggcctggagctactacatcggctacctgagactgatcctgcctgagctgcaggccagaatcagaacctacaaccagcactacaacaacctgctgagaggcgccgtgagccagagactgtacatcctgctgcctctggactgcggcgtgcctgacaacctgagcatggccgaccctaacatcagattcctggacaagctgcctcagcagaccggcgaccacgccggcatcaaggacagagtgtacagcaacagcatctacgagctgctggagaacggccagagagccggcacctgcgtgctggagtacgccacccctctgcagaccctgttcgccatgagccagtacagccaggccggcttcagcagagaggacatgctggagcaggccaagctgttctgcagaaccctggaggacatcctggccgacgcccctgagagccagaacaactgcagactgatcgcctaccaggagcctgccgacgacagcagcttcagcctgagccaggaggtgctgagacacctgagacaggaggagaaggaggaggtgaccgtgggcagcctgaagaccagcgccgtgcctagcaccagcaccatgagccaggagcctgagctgctgatcagcggcatggagaagcctctgcctctgagaaccgacttcagc

SEQ ID NO: 209 - DNA, 141 bp, Artificial Sequence
  Synthetic: (3 UTR used in STING V155M construct, containing miR122 binding site)
tgataataggctggagcctcggtggcctagcttcttgccccttgggcctccccccagcccctcctccccttcctgcacccgtaccccccaaacaccattgtcacactccagtggtctttgaataaagtctgagtgggcggc

SEQ ID NO: 210 - DNA, 1257 bp, Artificial Sequence
  Synthetic: (super mouse IRF3 S396D; no epitope tag)
atggagacccccaagcctagaatcctgccctggctggtgagccagctggacctgggccagctggagggcgtagcctggctggacgagagcagaaccagattcagaatcccctggaagcacggcctgagacaagacgcccagatggccgacttcggcatcttccaggcctgggccgaggccagcggcgcctacacccctggcaaggataagcccgatgtgagcacctggaagagaaacttcagaagcgccctgaacagaaaggaggtgctgagactggccgccgacaatagcaaggacccctacgacccccacaaggtgtacgagttcgttacccccggcgccagggacttcgtgcacctgggcgccagccccgacaccaacggcaagagcagcctgccccacagccaggagaacctgcccaagctgttcgatggcctgatcctgggccccctgaaggacgagggcagcagcgacctggccatcgtgagcgaccctagccagcagctgccctcccccaacgtgaacaacttcctgaaccccgccccccaggagaaccccctgaagcaactgctggccgaggagcagtgggagttcgaggtgaccgccttctacagaggcagacaggtgttccagcagaccctgttctgccccggcggcctgagactggtaggcagcaccgctgacatgaccctgccctggcagcccgtgaccctgcccgaccccgaaggctttctgaccgacaagctggtgaaggagtacgtcggccaagtgctgaagggcctgggcaacggcctggccctgtggcaggccggccagtgcctgtgggcccagagactcggccacagccacgccttctgggccctgggcgaggaactcctgcccgatagcggcagaggccccgacggcgaggtgcacaaggacaaggacggcgccgtgttcgacctgcgccccttcgtggccgacctgatcgccttcatggagggcagcggccacagccccagatataccctgtggttctgcatgggcgagatgtggccccaggaccagccctgggtgaagagactggtgatggtgaaggtggtgcccacctgcctgaaagagctgctggagatggccagagagggcggcgccagctccctgaaaaccgtggacctgcacattgacaacagccagcccatcagcctgaccagcgaccagtacaaggcctacctgcaggacctggtggaggacatggacttccaggccaccggcaacatc

SEQ ID NO: 211 - DNA, 1281 bp, Artificial Sequence
  Synthetic: (super human IRF3 S396D; no epitope tag)
atgggcacccccaagcccagaatcctgccctggctggtgagccagctggacctgggccagctggagggagtggcctgggtgaacaagagcagaaccagattcagaatcccctggaagcacggcctcagacaggacgcccagcaggaggacttcggcatttttcaggcttgggccgaggccaccggcgcctacgtgcccggcagagacaagcccgacctgcccacctggaaaagaaacttcagaagcgccttgaatagaaaggagggcctgagactggccgaggacagaagcaaggacccccacgaccctcacaagatctacgagttcgtgaatagcggcgtgggcgactttagccagcccgacaccagccccgacaccaacggcggcggcagcaccagcgacacgcaggaggacatcctggatgaactgctgggcaacatggtgctggcccccctgcccgatcccggccccccttcgcttgccgtggcccccgagccctgcccccagcccctgagaagcccctctctggataaccccacccccttccccaacctgggccccagcgagaatccactgaagagacttctggtccccggcgaggagtgggagttcgaggtgaccgccttctacagaggcagacaggtgttccagcagaccatcagctgccccgaaggcctgagattagtgggcagcgaagtgggcgacaggaccctgcccgggtggcccgtgaccctgcccgatcccggcatgagcctgaccgacagaggtgtgatgagctacgtgagacacgtgctgagctgcctgggcggcggcctggcactgtggagagccggccagtggctgtgggcccagagactgggccactgccacacctactgggccgtgagcgaggagctgctgcccaacagcggccacggccccgacggcgaggtgcccaaggacaaggaagggggcgtgttcgacctgggccccttcatcgtagacctgatcacctttaccgagggcagcggcaggagccccagatacgccctgtggttctgcgtgggcgaaagctggccccaggaccagccctggaccaagagactggtgatggtgaaggtagtgcccacctgcctgagagccttagtggagatggccagagtgggcggggccagcagcctggagaacaccgtggatcttcacatcgacaacagccaccccctgagcctgaccagcgaccagtacaaggcctacctgcaggacctggtggagggcatggacttccagggccccggcgagacc

SEQ ID NO: 212 - DNA, 1509 bp, Artificial Sequence
  Synthetic: (Wild-type Hu IRF7 isoform A; P037 without epitope tag)
atggcgctggcccccgaaagagccgcccccagagtcctcttcggcgaatggctccttggcgaaatttcgtcgggctgctacgagggcttacaatggctggatgaggcgagaacctgtttcagggtgccctggaaacacttcgccagaaaggatctaagcgaagcagatgctagaatttttaaggcttgggccgtggccaggggaagatggcccccctcgagcagaggcggcggccctccccccgaggcagaaacggccgagagagccggatggaaaaccaatttcagatgcgccctgagatctacaagaagattcgtgatgcttagagacaacagcggagatcccgccgatccccataaggtgtatgccctgtcccgggagctgtgctggagggaagggcctggcactgaccagaccgaagccgaagcccccgcggccgtgccgccgccccaaggaggcccaccaggccctttcctcgctcacacccacgccggtctgcaagccccgggacctctacctgcccctgccggcgataaaggcgacctgttgctgcaggccgtccaacagagctgcctggccgatcatctgctcacagccagctggggcgctgaccccgtcccaacaaaggcccccggtgagggccaagaaggcctgcctctgaccggcgcctgtgccggcggccctggcctgcctgctggcgagctgtacggatgggctgtcgaaaccactccctcccccggcccccaacctgcggccctgacaaccggcgaggcagccgcacccgaaagcccccaccaggccgaaccctacctcagtcccagcccctccgcctgcaccgctgtgcaggagcccagccccggtgctctggacgtaacaatcatgtacaaaggcagaaccgtgcttcagaaggtggttggacacccctcctgtacttttctctacggcccccccgaccctgccgtgagagctaccgacccgcaacaggtggcctttccctcgcccgccgaactgcccgatcaaaaacagctgagatacaccgaggagctgctgagacacgtggcgccgggcttacacctagagttgagaggcccccaactctgggccagacgcatgggcaagtgtaaggtgtactgggaggtcgggggccctcccggctctgccagccccagcacccctgcttgtctcttgcccagaaactgtgatacccccatcttcgacttccgtgtatttttccaggaactggtcgagtttagagccagacagagacgaggcagccccagatatacaatctacctcggcttcggccaggacctgagtgccggcagacctaaggagaagtcgctggtcctagtgaagttagagccctggctatgtagagtgcacctggagggcacccagagagaaggagtgagcagcctggacagcagcagcctgagtctgtgcctgagctccgccaactcgctgtatgatgacatcgagtgtttcctcatggagctggagcagcccgcc

SEQ ID NO: 213 - DNA, 1509 bp, Artificial Sequence
  Synthetic: (constitutively active Hu IRF7 S477D/S479D; P033 without epitope tag)
atggcccttgcccctgagcgggccgcccccagagtgttattcggcgagtggctgctgggcgagatcagcagcggctgctacgagggactgcagtggctggacgaggctagaacctgcttcagagtgccctggaagcatttcgccagaaaagacctgagcgaggctgatgctagaatcttcaaagcctgggctgtggcccgaggaagatggccccccagcagcagaggaggcggccctcctcccgaggccgaaaccgcagagcgtgctggctggaaaaccaactttaggtgtgccctgaggagcaccagaagattcgttatgctcagagacaacagcggggaccccgccgacccgcacaaggtgtacgccttaagtagggagctgtgctggagagagggaccggggaccgaccaaaccgaggctgaggcgcccgccgccgttccacctccccagggtggtcccccagggccctttctggcacacacccacgccggattacaggcgccagggcccttacccgcccccgccggagacaaaggcgacctcctgctgcaagccgtgcaacaaagctgcctggccgatcacttactaaccgctagctggggcgccgatcctgttcccaccaaggcccccggtgaagggcaagaaggactgcccttaaccggcgcctgtgccggaggccctggtctgccagccggcgagctgtacggttgggctgtcgaaacaacacccagtccgggcccacagcctgccgctctgaccaccggcgaagccgccgcccccgagagcccacaccaggctgaaccctacctgagccccagccccagcgcctgcaccgctgtgcaggagcctagccccggcgctcttgatgtgacaataatgtacaagggcaggaccgtgctgcaaaaggtcgtgggccatccgtcgtgtacctttctgtacggccctccagaccccgcggttagagccaccgacccccagcaagtcgccttcccctcccccgccgaactgcccgaccaaaagcagctgcggtacacagaagaactacttagacacgtggcccccggtctgcacttggagctgagaggcccccagctctgggccagaagaatgggcaagtgcaaagtgtactgggaggtgggcggcccacccggctcagcttcgccctccacacccgcatgcctgctgcccagaaattgcgacacgcccatcttcgattttagagtgttctttcaggagttggtggagttcagagccagacaaagacgcggcagccccagatacaccatttacctcggcttcggccaggacctcagcgctggcagacccaaggagaagagtctggtcctcgtgaagctggagccctggctgtgcagagtgcacctggagggcacccagcgtgaaggcgtgagcagcctggattcaagcgacctggacctatgcctaagcagcgctaactcactgtacgacgatatcgaatgcttcctgatggaactggagcagcctgcc

SEQ ID NO: 214 - DNA, 1509 bp, Artificial Sequence
  Synthetic: (constitutively active Hu IRF7 S475D/S477D/L480D; P034 without epitope tag)
atggccctggcacccgagagggccgcccccagggtgctcttcggcgagtggttactaggcgaaattagcagcggctgctatgaaggccttcagtggctggacgaggccagaacctgctttagagttccctggaagcacttcgcccggaaagatctctctgaagccgacgccagaatattcaaggcctgggctgtcgccaggggcaggtggccaccctccagccgaggtggcggccctccccctgaggctgagactgcggaaagggcgggctggaagaccaatttcagatgcgctctgagaagcaccagacgttttgtgatgctaagagacaatagcggcgatcccgccgacccccataaggtatacgcactgagccgagagctctgttggagagaaggccccggcaccgaccagaccgaggctgaagcccctgcagccgtgcccccccctcaaggcgggccccccggccccttcctggcccatacccatgcagggttacaagcacccgggcccttgcccgccccagcgggagacaagggcgacctcttactgcaggccgtgcaacaaagttgtctggcggaccacctgctgaccgcatcatggggcgcggatcctgtgcccaccaaggcacccggcgaaggccaggagggcctgcccttgaccggcgcctgcgctggcggacccggcctacctgctggcgaactgtatggctgggccgtagagacgactcccagccctggcccacaacccgcggctttgaccaccggcgaagccgccgcccccgagtctccgcaccaggccgagccttacctcagcccaagccctagcgcctgcaccgccgtgcaagaacctagccccggagccctggatgtgacaatcatgtacaagggtagaaccgtactgcaaaaggtggtgggtcatcccagctgcacctttctttacggcccacccgaccctgccgtgcgagccacagacccacaacaggtcgccttcccaagccccgccgaactgcccgatcagaaacagctgagatatacagaggagcttctgcggcacgtagctcccggcctacatctcgagctgaggggcccacaactgtgggccagacgcatgggcaaatgcaaggtctactgggaagtgggaggcccccccggcagcgcatctcccagcacgcccgcgtgcctgctgcctagaaattgcgacacccccatctttgacttccgggtattctttcaggagctggtagagttcagagccaggcagcggaggggctcccccagatacacaatctacctgggcttcggacaggacctgtccgccggccgccccaaggaaaagagcctggtgctggtgaagctggagccctggctgtgtagggtacacctcgaaggcacccagagagaaggagtgagctcgcttgatgacagcgatctgtcggattgccttagcagcgccaacagcctgtatgatgatatcgagtgcttccttatggaactggagcagcccgcc

SEQ ID NO: 215 - DNA, 1509 bp, Artificial Sequence
  Synthetic: (constitutively active Hu IRF7 S475D/S476D/S477D/S479D/S483D/S487D; P035 without epitope tag)
atggccctagcccccgaaagagcagctcccagagtgctgttcggcgaatggctgcttggcgagatcagcagcggctgctacgaaggcctgcagtggctggacgaagcccgcacctgtttcagagtgccctggaagcacttcgctagaaaggatttgagcgaggctgatgctagaatctttaaggcttgggctgtggcaagaggcagatggccgcctagtagcagagggggcggacctccccccgaggctgagaccgctgagagagcagggtggaaaaccaacttcagatgcgcgctgagaagcacccgaagattcgtgatgctacgtgacaatagcggcgaccccgccgacccccacaaagtgtacgccctgtcccgagaactttgctggagagagggacccggcaccgatcaaacagaggctgaggccccggccgctgtacccccgccccaaggaggccccccaggcccctttctggctcatacacatgccggcctgcaggcacccgggcccctcccggctcctgccggcgacaagggcgatctccttctccaggccgtgcagcagagctgcctggccgatcacctgctgaccgcctcgtggggcgccgaccccgtgcccaccaaagccccgggtgaaggccaagaggggctccctttaaccggagcatgcgccggaggccccggcctgccagccggcgagttatatggctgggctgtggagaccacaccctcccccggccctcaacccgctgccctgaccaccggtgaggccgccgcccccgagagcccacaccaggccgaaccctacctgagccctagccctagcgcctgcaccgccgtgcaagaacccagccccggagccctggatgtgaccattatgtacaagggccggacagtgctgcaaaaggttgtgggacacccgagctgcacctttctgtacggtccgcctgaccccgccgtgagagccacggacccgcagcaggtggccttcccctcacccgcggagctgcccgaccaaaagcaactcagatacacagaagaactattgcgtcacgtcgcgcccggcctgcatctggagctgagaggcccccagctctgggccagaaggatgggcaaatgcaaggtgtactgggaggtgggaggcccccccggcagcgccagccccagcactcccgcgtgcctgctgcccagaaattgcgacactcccatcttcgatttcagggtgttcttccaggagctggtggagttcagagccaggcagagaaggggtagccccagatacacaatctatctaggctttggacaagatctgagcgccggccggcctaaggaaaaaagcctggtgctggtaaagctggagccgtggctttgtagagtgcacctggaggggacgcagcgagagggcgtgagcagcttagacgacgatgacttggatctgtgtctcgacagcgccaacgacttgtacgacgacatcgagtgcttcctgatggaactggagcagcccgcc

SEQ ID NO: 216 - DNA, 846 bp, Artificial Sequence
  Synthetic: (constitutively active truncated Hu IRF7 1-246 + 468-503; P032 without epitope tag)
atggccctggcccccgagagagccgcccccagagtgctcttcggcgagtggctgctgggcgagataagcagcggctgctacgaaggtctgcagtggctagacgaggccagaacctgctttagagtgccctggaagcacttcgctcgaaaggacctgtccgaggccgatgctagaatttttaaggcttgggccgtcgctaggggaagatggccccctagcagtagaggcggcggcccccctcccgaagccgagacggccgagagggccggctggaaaaccaatttcagatgcgccctgaggagcacccgcaggttcgtaatgctgcgagacaatagcggcgatcctgcggatcctcacaaggtttacgccttgagtagagaactgtgctggcgggagggccccggaaccgaccagacggaggcagaggcacccgctgccgtgcccccccctcaaggaggaccccctggaccctttctggcccacacccacgctggtctgcaggccccaggcccactgcccgccccagcgggcgataagggtgacctgctcctacaggcggtgcaacagagctgtctggccgaccacctgttgaccgccagctggggggccgacccggtgcccaccaaagctcccggagagggccaagaaggcctcccactaactggcgcctgcgccgggggcccgggattacccgccggcgagctgtatggctgggccgtggagaccacgcccagccccgagggcgtgtcgtccctggacagcagcagcctgagcctgtgcctgagctccgccaacagcctgtatgacgacatcgagtgcttcctgatggagctggaacaacccgcc

SEQ ID NO: 217 - DNA, 846 bp, Artificial Sequence
  Synthetic: (constitutively active truncated Hu IRF7 1-246 + 468-503 plus S475D/S476D/S477D/S479D/S483D/S487D; P036 without epitope tag)
atggcactggcgcctgaaagagccgctccgcgtgtgctcttcggcgagtggctgctgggcgagatcagctccggctgctacgagggtctacagtggctggacgaggccagaacctgttttagagtgccctggaagcacttcgcgagaaaggacctgagcgaggccgacgccagaatcttcaaagcctgggcagtggctaggggcagatggcctcccagcagccggggcggcggcccaccccccgaggccgaaaccgccgaaagagctggctggaagaccaacttcagatgcgccctgagaagcaccagaagatttgtcatgctgagagataattcaggagaccccgccgaccctcacaaggtgtacgccctgtccagagagctgtgttggagagagggccccggaaccgaccagaccgaggccgaggctccagctgccgtgccacccccccaaggcggaccacccggccccttcttggcacatacgcacgccggcctccaggctcccggccctctgcccgcccctgctggtgacaaaggcgatctgctgctgcaagccgtccagcaatcctgcttggctgaccacctgctgaccgctagctggggagccgaccccgttcccaccaaggctcccggagaaggacaggagggcctgccccttaccggcgcttgcgcggggggccctggcttgcctgccggcgaactgtacggctgggccgtggagaccacgccttcccccgagggcgtgtccagcctggacgatgatgacctggatctgtgcctggacagcgccaacgacctgtacgatgacatcgagtgctttttgatggagctggagcagcccgcc

SEQ ID NO: 218 - DNA, 1224 bp, Artificial Sequence
  Synthetic: (truncated Hu IRF7 1-151 + 247-503; P038 without epitope tag; null mutation)
atggccctggcccccgagagagccgcgcccagagtgctgttcggcgaatggctgctgggcgagatcagcagcggctgctatgagggcctgcagtggctcgacgaagccaggacgtgcttcagagtcccctggaagcacttcgccagaaaggatctgagcgaggctgacgccagaatcttcaaggcctgggcagttgcgcgtgggagatggccccccagctcgcggggcggcggtcccccccctgaggccgagaccgccgaaagagccggatggaaaaccaactttcgatgcgccctcagaagcaccagacggtttgtgatgctgagagataacagcggcgaccctgcagacccccataaagtgtatgccctgagcagagagctgtgttggcgagagggccccggaaccgaccaaaccgaggccgaggcccccgccgccgtacccccccctcaaggcccccagcctgctgctctgaccacgggagaagccgccgctcctgagagcccccaccaagccgagccctatctgagccctagccccagcgcctgcaccgccgtgcaggagccctcaccgggcgccctagacgtgaccatcatgtacaaggggcgcacggtgctgcaaaaggtggtgggccaccccagctgcaccttcctgtacggcccccccgaccctgccgtgagagccaccgacccccagcaagtcgccttccccagccccgccgagctgcccgaccagaagcagctgaggtacaccgaggagttgctgagacatgtggcccccggcttgcacctcgagctgagaggcccgcagctctgggccagaagaatgggcaagtgcaaggtgtactgggaggtgggcggcccccccggcagcgcgagcccaagcaccccggcctgcctgctgcctagaaactgcgacacccctatcttcgacttcagagtatttttccaggagctggtcgagttcagggccagacagcgtagaggcagccccagatacaccatctaccttggattcggccaggacctgagcgccggcagacccaaagagaagtccctggtactggtgaagctagagccctggctgtgtagggtgcatctggaaggcacccaaagagagggcgtaagctcgcttgacagcagcagcctcagcctgtgcctgagcagcgctaacagcttatacgacgacatcgagtgcttcctgatggagctggaacaacccgcc

SEQ ID NO: 219 - DNA, 1059 bp, Artificial Sequence
  Synthetic: (truncated Hu IRF7 152-503; P039 without epitope tag; null mutation)
atgggcggccctcccgggcctttcctggcccatacacacgccggcctacaggctcctggccctctgcccgccccggccggcgacaagggcgacctcctgctgcaggccgtgcagcagtcctgtctggccgaccacctgctgactgctagctggggcgccgatcccgtgcccaccaaggccccaggagaggggcaagagggcctgcctctaaccggcgcatgcgcaggtggaccaggcctccccgccggcgagctgtatggttgggccgtggagacaacccccagccccggcccgcagcctgctgcgctgaccacaggcgaggccgctgcccctgagagcccccaccaagctgaaccctacctgagccccagcccctctgcctgcacagcggtgcaggagcccagtcccggcgccttggacgtgaccatcatgtataagggcaggactgtgttacaaaaggtagtgggccacccaagttgtacctttctgtacgggccccccgacccagccgtgcgcgccaccgacccccagcaggtggccttccccagccccgctgagttgcccgatcagaaacaactccggtacaccgaggaattacttagacatgtggctcccggcctgcatctggagcttagaggtccacagttgtgggccagaagaatgggcaagtgcaaggtttattgggaggtcggaggccccccgggcagcgccagccccagcacccccgcctgtcttctgcccagaaactgcgacaccccaatcttcgatttcagagtgtttttccaggaactggtggagttcagagcaaggcaaagaagaggcagccctagatacaccatctacctgggctttggccaagacctgagcgccggcagacccaaggaaaaatccctggtcctggtgaaactggagccctggctgtgcagagtccacctggagggcacccagagagagggcgtgagcagcctggactcgagcagcctgtccctgtgtctgagcagcgcgaattcgctatatgacgacatcgaatgctttctgatggagctggaacagcccgcc

SEQ ID NO: 220 - DNA, 1269 bp, Artificial Sequence
  Synthetic: (KRAS(G12D)25mer_nt.STING(V155M))
atgcctcacagcagcctccaccctagcatcccttgccctagaggccacggcgcccagaaggccgccctcgtgcttttaagcgcctgcttggtgaccctttggggcttgggcgagcctccagagcacaccttgagatatttggtgctccacctggccagccttcagctgggcttgttactcaacggcgtgtgcagcctggccgaggagctgagacacatccacagcagatacagaggcagctactggagaaccgtgagagcgtgtctgggctgccctctgagaagaggcgccttgcttcttctcagtatctacttctactactccctgcctaacgccgtgggccctcctttcacctggatgctggcactgctcggcctcagccaggccctgaacatcttgttgggcttgaagggcctggcccctgccgagatcagcgccgtgtgcgagaagggcaacttcaacatggcccacggattggcttggagctactacatcggctacctgagactgatcctgcctgagctgcaggccagaatcagaacctacaaccagcactacaacaacctgctgcgcggcgcagtgagccagagactgtatattctgctgcctctggactgcggcgtgcctgacaacctgagcatggccgaccctaacatcagattcctggacaagctgcctcagcagaccggcgaccacgccggcatcaaggacagagtgtacagcaacagcatctatgagctgctcgagaatggccagagagccggcacctgcgtgctggagtacgccacccctctgcagaccctgttcgccatgagccagtatagtcaagctggcttcagcagagaggacagactggagcaggccaagctgttctgcagaaccctggaggacattctggctgacgcccctgagagccagaacaactgccgactgatcgcctaccaggaaccagccgacgacagcagcttcagtctttctcaggaggttcttcgccacttgcgccaggaggagaaggaggaggtgaccgtgggcagcctgaagacctccgcagtccctagcaccagcaccatgagtcaggagccggagctattaatcagcggcatggagaagcctcttccactccgaaccgacttcagcgccaccaacttcagcctgctgaagcaggcaggtgacgttgaggagaatccgggacctatgaccgagtacaagctggtggttgtgggcgccgacggcgtgggcaagagcgccctgaccatccagctgatccag

SEQ ID NO: 221 - DNA, 1269 bp, Artificial Sequence
  Synthetic: (KRAS(G12D)25mer_ct.STING(V155M))
atgaccgagtacaagctagtagtcgtgggcgccgacggcgtgggcaagagcgccctcaccatccagctaatccaggccaccaacttcagcttgctcaagcaggccggcgacgtggaggagaacccaggccctatgcctcacagcagccttcaccctagcatcccttgccctagaggccacggcgcccagaaggccgccctggtgctgctgagcgcctgcctggtgaccctgtggggcctgggcgagcctcctgagcacaccctgagatatctggtgcttcacctggccagtttacagctgggcctgcttcttaacggcgtgtgcagcctggccgaggagctgagacacatccacagcagatacagaggcagctactggagaaccgtgagagcctgcctaggctgccctctgagaagaggcgctctgttgctactttccatctacttctactactccctgcctaacgccgtgggccctcctttcacttggatgctggcgttgctgggtctgagccaggccctgaacatccttctcggtctgaagggcctggcccctgccgagatcagcgccgtgtgcgagaagggcaacttcaacatggcccacggactcgcctggagctactacatcggctacctgagactgatcctgcctgagctgcaggccagaatcagaacctacaaccagcactacaacaacctgctgcggggcgccgtgagccagagactgtatatacttcttcctctggactgcggcgtgcctgacaacctgagcatggccgaccctaacatcagattcctggacaagctgcctcagcagaccggcgaccacgccggcatcaaggacagagtgtacagcaactccatttatgagctgctcgagaatggccagagagccggcacctgcgtgctggagtacgccacccctctgcagaccctgttcgccatgagccagtacagtcaggctggattcagcagagaggacagactggagcaggccaagctgttctgcaggacactggaggacatactagcagacgcccctgagagccagaacaactgcagactgattgcctaccaggagcctgcggacgacagctccttcagtctgagtcaggaggtgttgcggcacttacgccaagaagagaaggaggaggtgaccgtgggcagcctgaagactagcgctgtgcctagcaccagcacaatgtcacaggagccggaattgctaatcagcggcatggagaagcctctcccattacgtaccgacttcagc

SEQ ID NO: 222 - DNA, 1419 bp, Artificial Sequence
  Synthetic: (KRAS(G12D)25mer^3_nt.STING(V155M))
atgcctcacagcagccttcaccctagcatcccttgccctagaggccacggcgcccagaaggccgccctagtgctccttagcgcctgcctcgtgaccctatggggcttaggcgagcctccagagcacaccttgagatacctcgtcctccacctggctagtctacagctgggccttctcctcaacggcgtgtgcagcctggccgaggagctgagacacatccacagcagatacagaggcagctactggagaaccgtgagagcgtgcctgggctgccctctgagaagaggcgcactgctgttactcagcatctacttctactactcactgccaaacgccgtgggccctcctttcacctggatgctggccttgctcggattgagccaggccctgaacattttactgggattgaagggcctggcccctgccgagatcagcgccgtgtgcgagaagggcaacttcaacatggcccacggcctagcttggagctactacatcggctacctgagactgatcctgcctgagctgcaggccagaatcagaacctacaaccagcactacaacaacctgctgcgtggagcggtgagccagagactgtatatcctcctgcctctggactgcggagtgcctgacaacctgagcatggccgaccctaacatcagattcctggacaagctgcctcagcagaccggcgaccacgccggcatcaaggacagagtgtacagcaactcaatctacgagctgttggagaatggccagagagccggcacctgcgtgctggagtacgccacccctctgcagaccctgttcgccatgagccagtactctcaggcaggcttcagcagagaggacagactggagcaggccaagctgttctgcagaaccctggaggacatcctggcggacgcccctgagagccagaacaactgccggcttatcgcctaccaggagccagcagacgacagcagcttctctctctcacaagaggtactgcgccatcttcgccaggaggagaaggaggaggtgaccgtgggcagcctgaagacatccgccgtacctagcaccagcaccatgtctcaggaaccggaactgttgatcagcggcatggagaagcctctgccactgcgcaccgacttcagcgccaccaacttctccctactgaagcaagccggtgacgttgaagagaaccctggccctatgaccgagtacaagctggtagtagtaggcgccgacggcgtgggcaagagcgccctgaccatccagctgatccagatgactgaatataagcttgtcgtcgtgggcgcagatggcgttggtaagagcgcacttacaattcaactcattcagatgacggagtataagctggtggtggtcggagctgacggcgtaggcaagagtgcccttactattcagctaattcag

SEQ ID NO: 223 - DNA, 1419 bp, Artificial Sequence
  Synthetic: (KRAS(G12D)25mer^3_ct.STING(V155M))
atgaccgagtacaagcttgtggtggttggcgccgacggcgtgggcaagagcgccttaaccatccagcttatccagatgacagagtataagctagtggtggtcggcgcagacggagtgggaaagagtgcattaactattcaactcatccaaatgaccgaatacaagctagtagttgtgggtgcagatggcgtcggcaagtctgcactgacaattcagctcatccaggccaccaacttcagcctgctgaagcaggccggcgacgtggaggagaaccctggccctatgcctcacagcagcctgcaccctagcatcccttgccctagaggccacggcgcccagaaggccgccctggtgctgctgagcgcctgcctggtgaccctgtggggcctgggcgagcctcctgagcacaccctgagatacctagttttgcacctggcttctctgcagctgggcctactgctcaacggcgtgtgcagcctggccgaggagctgagacacatccacagcagatacagaggcagctactggagaaccgtgagagcatgcttaggctgccctctgagaagaggcgctctgctcctcttgtccatctacttctactactcgctacctaacgccgtgggccctcctttcacctggatgctggccctcttgggattaagccaggccctgaacatcttgctgggactgaagggcctggcccctgccgagatcagcgccgtgtgcgagaagggcaacttcaacatggcccacggactcgcttggagctactacatcggctacctgagactgatcctgcctgagctgcaggccagaatcagaacctacaaccagcactacaacaacctgctgcggggagcagtgagccagagactgtatattctgctccctctggactgcggcgtgcctgacaacctgagcatggccgaccctaacatcagattcctggacaagctgcctcagcagaccggcgaccacgccggcatcaaggacagagtgtacagcaacagcatttacgagctgctggagaacggccagagagccggcacctgcgtgctggagtacgccacccctctgcagaccctgttcgccatgagccagtactcccaggcaggattcagcagagaggacagactggagcaggccaagctgttctgccgtactcttgaggacatccttgcagacgcccctgagagccagaacaactgccggttgattgcctaccaggaaccggcagacgacagctcattctccttgtctcaggaggtccttagacacctgcggcaggaggagaaggaggaggtgaccgtgggcagcctgaagacatccgccgtgcctagcacgtctaccatgtcccaggagccggaactgctaatcagcggcatggagaagcctctgcctctcaggaccgacttcagc

SEQ ID NO: 224 - protein, 380 aa, Artificial Sequence
  Synthetic: (Hu STING (R284K) var; no epitope tag)
MPHSSLHPSIPCPRGHGAQKAALVLLSACLVTLWGLGEPPEHTLRYLVLHLASLQLGLLLNGVCSLAEELRHIHSRYRGSYWRTVRACLGCPLRRGALLLLSIYFYYSLPNAVGPPFTWMLALLGLSQALNILLGLKGLAPAEISAVCEKGNFNVAHGLAWSYYIGYLRLILPELQARIRTYNQHYNNLLRGAVSQRLYILLPLDCGVPDNLSMADPNIRFLDKLPQQTGDHAGIKDRVYSNSIYELLENGQRAGTCVLEYATPLQTLFAMSQYSQAGFSREDKLEQAKLFCRTLEDILADAPESQNNCRLIAYQEPADDSSFSLSQEVLRHLRQEEKEEVTVGSLKTSAVPSTSTMSQEPELLISGMEKPLPLRTDFST

SEQ ID NO: 225 - DNA, 1140 bp, Artificial Sequence
  Synthetic: (Hu STING (R284K) var; no epitope tag)
atgccccatagcagcctgcaccccagcatcccctgccccagaggccacggcgcccagaaggccgccctggtcctgctgagcgcatgcctggtcaccctgtggggcctgggcgagccccccgagcacaccctgagatacctggtgctgcacctcgccagcctgcagctgggcctgctgctgaacggcgtgtgcagcctggccgaggagctgagacacatccacagcagatatagaggcagctactggagaaccgtgagagcttgcctcggctgccccctgagaagaggcgccctgctgctgctgagcatctacttttactacagcctgcccaacgctgtgggcccccctttcacgtggatgctcgccctgctgggactgagccaggccctgaacatcctgctgggccttaagggcctagcccccgccgagatcagcgccgtgtgcgagaagggcaacttcaatgtggcccacggcctggcctggagctactacatcggctacctgagactgatcctgcccgagctgcaggccagaatcagaacctacaatcagcactacaacaacctgctgagaggcgccgtgagccagagactgtacatcctgctgcccctggactgcggcgtgcccgacaacctcagcatggccgaccccaacatcagattcctggacaagctgccccagcagaccggcgaccacgccggcatcaaggatcgcgtgtacagcaacagcatctacgagctgctggaaaacggccagagagccggaacctgcgtgctggagtacgccacacccctgcagaccctgttcgccatgagccagtacagccaggccggcttcagcagagaggacaagctggagcaggccaagctgttctgcagaaccctggaggatatcctcgccgacgcccccgagagccagaacaactgcaggctgatcgcgtaccaggagcccgctgacgacagcagctttagcctgagccaggaggtgctgagacatctgcgtcaagaggaaaaggaggaggtgaccgtgggctccctgaagaccagcgccgtgcccagcaccagcaccatgagccaggagcccgagctgctgatcagcggcatggagaagccactgcccctcagaaccgacttcagcacc

SEQ ID NO: 226 - protein, 41 aa, Artificial Sequence
  Synthetic: Cathepsin B sensitive site
EGAMVAATQGAAAAAGSGAGTGGGTASGGTEGGSAESEGAK

SEQ ID NO: 227 - protein, 39 aa, Artificial Sequence
  Synthetic: Cathepsin B sensitive site
AMVAATQGAAAAAGSGAGTGGGTASGGTEGGSAESEGAK

SEQ ID NO: 228 - protein, 26 aa, Artificial Sequence
  Synthetic: Cathepsin B sensitive site
GGGGGGGGAGAAGGGGGGENYDDPHK

SEQ ID NO: 229 - protein, 38 aa, Artificial Sequence
  Synthetic: Cathepsin B sensitive site
MVAATQGAAAAAGSGAGTGGGTASGGTEGGSAESEGAK

SEQ ID NO: 230 - protein, 17 aa, Artificial Sequence
  Synthetic: Cathepsin B sensitive site
QLLCGAAIGTHEDDKYR

SEQ ID NO: 231 - protein, 22 aa, Artificial Sequence
  Synthetic: Cathepsin B sensitive site
FSHHFEDADNIYIFLELCSRKS

SEQ ID NO: 232 - protein, 15 aa, Artificial Sequence
  Synthetic: Cathepsin B sensitive site
  misc_feature (2)..(2): Xaa can be any naturally occurring amino acid
YXLVGAGAIGCELLK

SEQ ID NO: 233 - protein, 26 aa, Artificial Sequence
  Synthetic: Cathepsin B sensitive site
IPESCSFGYHAGGWGKPPVDETGKPL

SEQ ID NO: 234 - protein, 36 aa, Artificial Sequence
  Synthetic: Cathepsin B sensitive site
VAATQGAAAAAGSGAGTGGGTASGGTEGGSASEGAK

SEQ ID NO: 235 - protein, 22 aa, Artificial Sequence
  Synthetic: Cathepsin B sensitive site
SEADIEGPLPAKDIHLDLPSNN

SEQ ID NO: 236 - protein, 16 aa, Artificial Sequence
  Synthetic: Cathepsin B sensitive site
HFNALGGWGELQNSVK

SEQ ID NO: 237 - protein, 12 aa, Artificial Sequence
  Synthetic: Cathepsin B sensitive site
FAQALGLTEAVK

SEQ ID NO: 238 - protein, 17 aa, Artificial Sequence
  Synthetic: Cathepsin B sensitive site
TSVLAAANPIESQWNPK

SEQ ID NO: 239 - protein, 16 aa, Artificial Sequence
  Synthetic: Cathepsin B sensitive site
QLLQANPILESFGNAK

SEQ ID NO: 240 - protein, 16 aa, Artificial Sequence
  Synthetic: Cathepsin B sensitive site
TSILAAANPISGHYDR

SEQ ID NO: 241 - protein, 15 aa, Artificial Sequence
  Synthetic: Cathepsin B sensitive site
  misc_feature (2)..(3): Xaa can be any naturally occurring amino acid
IXXANPLLEAFGNAK

SEQ ID NO: 242 - protein, 17 aa, Artificial Sequence
  Synthetic: Cathepsin B sensitive site
LYGAQFHPEVGLTENGK

SEQ ID NO: 243 - protein, 22 aa, Artificial Sequence
  Synthetic: Cathepsin B sensitive site
PQGQAPPLSQAQGHPGIQTPQR

SEQ ID NO: 244 - protein, 27 aa, Artificial Sequence
  Synthetic: Cathepsin B sensitive site
AAASAAAASAASGSPGPGEGSAGGEKR

SEQ ID NO: 245 - protein, 16 aa, Artificial Sequence
  Synthetic: Cathepsin B sensitive site
  misc_feature (2)..(4): Xaa can be any naturally occurring amino acid
IXXXFLGASLKDEVLK

SEQ ID NO: 246 - protein, 21 aa, Artificial Sequence
  Synthetic: Cathepsin B sensitive site
LTISPDYAYGATGHPGIIPPH

SEQ ID NO: 247 - protein, 22 aa, Artificial Sequence
  Synthetic: Cathepsin B sensitive site
LTISPDYAYGATGHPGIIPPHA

SEQ ID NO: 248 - protein, 19 aa, Artificial Sequence
  Synthetic: Cathepsin B sensitive site
ILISLATGHREEGGENLDQ

SEQ ID NO: 249 - protein, 27 aa, Artificial Sequence
  Synthetic: Cathepsin B sensitive site
LSELTQQLAQATGKPPQYIAVHVVPDQ

SEQ ID NO: 250 - protein, 28 aa, Artificial Sequence
  Synthetic: Cathepsin B sensitive site
LSELTQQLAQATGKPPQYIAVHVVPDQL

SEQ ID NO: 251 - protein, 19 aa, Artificial Sequence
  Synthetic: Cathepsin B sensitive site
DATNVGDEGGFAPNILENK

SEQ ID NO: 252 - protein, 14 aa, Artificial Sequence
  Synthetic: Cathepsin B sensitive site
ILAQATSDLVNAIK

SEQ ID NO: 253 - protein, 15 aa, Artificial Sequence
  Synthetic: Cathepsin B sensitive site
  misc_feature (2)..(3): Xaa can be any naturally occurring amino acid
  misc_feature (5)..(5): Xaa can be any naturally occurring amino acid
VXXVXQHAVGIVVNK

SEQ ID NO: 254 - protein, 23 aa, Artificial Sequence
  Synthetic: Cathepsin B sensitive site
GSLAEAVGSPPPAATPTPTPPTR

SEQ ID NO: 255 - protein, 19 aa, Artificial Sequence
  Synthetic: Cathepsin B sensitive site
  misc_feature (2)..(2): Xaa can be any naturally occurring amino acid
SXGLPVGAVINCADNTGAK

SEQ ID NO: 256 - protein, 23 aa, Artificial Sequence
  Synthetic: Cathepsin B sensitive site
YCFSEMAPVCAVVGGILAQEIVK

SEQ ID NO: 257 - protein, 20 aa, Artificial Sequence
  Synthetic: Cathepsin B sensitive site
HVYGYSMAYGPAQHAISTEK

SEQ ID NO: 258 - protein, 20 aa, Artificial Sequence
  Synthetic: Cathepsin B sensitive site
LWQLSKPRPGCSVLGPLPLL

SEQ ID NO: 259 - protein, 18 aa, Artificial Sequence
  Synthetic: Cathepsin B sensitive site
MILIQDGSQNTNVDKPLR

SEQ ID NO: 260 - protein, 22 aa, Artificial Sequence
  Synthetic: Cathepsin B sensitive site
TYSMVVVPLYDTLGPGAIRYII

SEQ ID NO: 261 - protein, 22 aa, Artificial Sequence
  Synthetic: Cathepsin B sensitive site
HFAMMHGGTGFAGIDSSSPEVK

SEQ ID NO: 262 - protein, 21 aa, Artificial Sequence
  Synthetic: Cathepsin B sensitive site
  misc_feature (2)..(2): Xaa can be any naturally occurring amino acid
GXLKPGMVVTFAPVNVTTEVK

SEQ ID NO: 263 - protein, 15 aa, Artificial Sequence
  Synthetic: Cathepsin B sensitive site
FNALFAQGNYSEAAK

SEQ ID NO: 264 - protein, 24 aa, Artificial Sequence
  Synthetic: Cathepsin B sensitive site
GPIHIGGPPGFASSSGKPGPTVIK

SEQ ID NO: 265 - protein, 15 aa, Artificial Sequence
  Synthetic: Cathepsin B sensitive site
GFGFVTFDDHDPVDK

SEQ ID NO: 266 - protein, 20 aa, Artificial Sequence
  Synthetic: Cathepsin B sensitive site
DQGSCGSCWAFGAVEAISDR

SEQ ID NO: 267 - protein, 21 aa, Artificial Sequence
  Synthetic: Cathepsin B sensitive site
  misc_feature (2)..(2): Xaa can be any naturally occurring amino acid
GXNFGFGDSRGGGGNFGPGPG

SEQ ID NO: 268 - protein, 19 aa, Artificial Sequence
  Synthetic: Cathepsin B sensitive site
HDLFDSGFGGGAGVETGGK

SEQ ID NO: 269 - protein, 15 aa, Artificial Sequence
  Synthetic: Cathepsin B sensitive site
CYLFGGLANDSEDPK

SEQ ID NO: 270 - protein, 20 aa, Artificial Sequence
  Synthetic: Cathepsin B sensitive site
TTEDSVMLNGFGTVVNALGK

SEQ ID NO: 271 - protein, 20 aa, Artificial Sequence
  Synthetic: Cathepsin B sensitive site
LTEGLHGFHVHEFGDNTAGC

SEQ ID NO: 272 - protein, 11 aa, Artificial Sequence
  Synthetic: Cathepsin B sensitive site
GYAFIEYEHER

SEQ ID NO: 273 - protein, 13 aa, Artificial Sequence
  Synthetic: Cathepsin B sensitive site
MFIGGLSWDTSKK

SEQ ID NO: 274 - protein, 13 aa, Artificial Sequence
  Synthetic: Cathepsin B sensitive site
MFIGGLSWDTTKK

SEQ ID NO: 275 - protein, 12 aa, Artificial Sequence
  Synthetic: Cathepsin B sensitive site
SMGFIGHYLDQK

SEQ ID NO: 276 - protein, 12 aa, Artificial Sequence
  Synthetic: Cathepsin B sensitive site
SMGFIGHYLDQK

SEQ ID NO: 277 - protein, 21 aa, Artificial Sequence
  Synthetic: Cathepsin B sensitive site
  misc_feature (3)..(3): Xaa can be any naturally occurring amino acid
ALXGGIGFIHHNCTPEFQANE

SEQ ID NO: 278 - protein, 19 aa, Artificial Sequence
  Synthetic: Cathepsin B sensitive site
NLQSTFSGFGFINSENVFK

SEQ ID NO: 279 - protein, 15 aa, Artificial Sequence
  Synthetic: Cathepsin B sensitive site
GFCFITYTDEEPVKK

SEQ ID NO: 280 - protein, 12 aa, Artificial Sequence
  Synthetic: Cathepsin B sensitive site
MPMFIVNTNVPR

SEQ ID NO: 281 - protein, 19 aa, Artificial Sequence
  Synthetic: Cathepsin B sensitive site
VSEIFVELQGFLAAEQDIR

SEQ ID NO: 282 - protein, 11 aa, Artificial Sequence
  Synthetic: Cathepsin B sensitive site
GFCFLEYEDHK

SEQ ID NO: 283 - protein, 15 aa, Artificial Sequence
  Synthetic: Cathepsin B sensitive site
QAVSMFLGAVEEAKK

SEQ ID NO: 284 - protein, 17 aa, Artificial Sequence
  Synthetic: Cathepsin B sensitive site
  misc_feature (3)..(3): Xaa can be any naturally occurring amino acid
KPXKPMQFLGDEETVRK

SEQ ID NO: 285 - protein, 22 aa, Artificial Sequence
  Synthetic: Cathepsin B sensitive site
GAAEPHTIAAFLGGAAAQEVIK

SEQ ID NO: 286 - protein, 17 aa, Artificial Sequence
  Synthetic: Cathepsin B sensitive site
MIPCDFLIPVQTQHPIR

SEQ ID NO: 287 - protein, 19 aa, Artificial Sequence
  Synthetic: Cathepsin B sensitive site
QGAPTSFLPPEASQLKPDR

SEQ ID NO: 288 - protein, 14 aa, Artificial Sequence
  Synthetic: Cathepsin B sensitive site
STGGAPTFNVTVTK

SEQ ID NO: 289 - protein, 13 aa, Artificial Sequence
  Synthetic: Cathepsin B sensitive site
MVYMFQYDSTHGK

SEQ ID NO: 290 - protein, 22 aa, Artificial Sequence
  Synthetic: Cathepsin B sensitive site
HFPMTHGNTGFSGIESSSPEVK

SEQ ID NO: 291 - protein, 12 aa, Artificial Sequence
  Synthetic: Cathepsin B sensitive site
AVAFSPVTELKK

SEQ ID NO: 292 - protein, 22 aa, Artificial Sequence
  Synthetic: Cathepsin B sensitive site
GFGFVTFSSMAEVDAAMAARPH

SEQ ID NO: 293 - protein, 15 aa, Artificial Sequence
  Synthetic: Cathepsin B sensitive site
TCGFDFTGAVEDISK

SEQ ID NO: 294 - protein, 18 aa, Artificial Sequence
  Synthetic: Cathepsin B sensitive site
EYSGLSDGYGFTTDLFGR

SEQ ID NO: 295 - protein, 23 aa, Artificial Sequence
  Synthetic: Cathepsin B sensitive site
  misc_feature (5)..(5): Xaa can be any naturally occurring amino acid
GQHVXGSPFQFTVGPLGEGGAHK

SEQ ID NO: 296 - protein, 14 aa, Artificial Sequence
  Synthetic: Cathepsin B sensitive site
GFGFVDFNSEEDAK

SEQ ID NO: 297 - protein, 10 aa, Artificial Sequence
  Synthetic: Cathepsin B sensitive site
  misc_feature (2)..(2): Xaa can be any naturally occurring amino acid
FXFVEFEDPR

SEQ ID NO: 298 - protein, 10 aa, Artificial Sequence
  Synthetic: Cathepsin B sensitive site
  misc_feature (2)..(2): Xaa can be any naturally occurring amino acid
FXFVEFEDPR

SEQ ID NO: 299 - protein, 17 aa, Artificial Sequence
  Synthetic: Cathepsin B sensitive site
IELFVGGELIDPADDRK

SEQ ID NO: 300 - protein, 13 aa, Artificial Sequence
  Synthetic: Cathepsin B sensitive site
MFVGGLSWDTSKK

SEQ ID NO: 301 - protein, 16 aa, Artificial Sequence
  Synthetic: Cathepsin B sensitive site
AFSAFVGQMHQQGILK

SEQ ID NO: 302 - protein, 17 aa, Artificial Sequence
  Synthetic: Cathepsin B sensitive site
GILFVGSGVSGGEEGAR

SEQ ID NO: 303 - protein, 18 aa, Artificial Sequence
  Synthetic: Cathepsin B sensitive site
IIAFVGSPVEDNEKDLVK

SEQ ID NO: 304 - protein, 10 aa, Artificial Sequence
  Synthetic: Cathepsin B sensitive site
DYAFVHFEDR

SEQ ID NO: 305 - protein, 15 aa, Artificial Sequence
  Synthetic: Cathepsin B sensitive site
GYAFVHFETQEAADK

SEQ ID NO: 306 - protein, 15 aa, Artificial Sequence
  Synthetic: Cathepsin B sensitive site
GYGFVHFETQEAAER

SEQ ID NO: 307 - protein, 10 aa, Artificial Sequence
  Synthetic: Cathepsin B sensitive site
NYGFVHIEDK

SEQ ID NO: 308 - protein, 18 aa, Artificial Sequence
  Synthetic: Cathepsin B sensitive site
ITLPVDFVTADKFDENAK

SEQ ID NO: 309 - protein, 15 aa, Artificial Sequence
  Synthetic: Cathepsin B sensitive site
GFGFVTFDDHDPVDK

SEQ ID NO: 310 - protein, 17 aa, Artificial Sequence
  Synthetic: Cathepsin B sensitive site
LPNFGFVVFDDSEPVQK

SEQ ID NO: 311 - protein, 15 aa, Artificial Sequence
  Synthetic: Cathepsin B sensitive site
GFGFVYFQNHDAADK

SEQ ID NO: 312 - protein, 11 aa, Artificial Sequence
  Synthetic: Cathepsin B sensitive site
YQFWDTQPVPK

SEQ ID NO: 313 - protein, 17 aa, Artificial Sequence
  Synthetic: Cathepsin B sensitive site
QLLCGAAIGTHEDDKYR

SEQ ID NO: 314 - protein, 17 aa, Artificial Sequence
  Synthetic: Cathepsin B sensitive site
QLLCGAAIGTHEDDKYR

SEQ ID NO: 315 - protein, 26 aa, Artificial Sequence
  Synthetic: Cathepsin B sensitive site
PPAGGGGGAGGAGGGPPPGPPGAGDR

SEQ ID NO: 316 - protein, 21 aa, Artificial Sequence
  Synthetic: Cathepsin B sensitive site
FGGSFAGSFGGAGGHAPGVAR

SEQ ID NO: 317 - protein, 26 aa, Artificial Sequence
  Synthetic: Cathepsin B sensitive site
CNPIISGLYQGAGGPGPGGFGAQGPK

SEQ ID NO: 318 - protein, 22 aa, Artificial Sequence
  Synthetic: Cathepsin B sensitive site
PGLNLPPPIGGAGPPLGLPKPK

SEQ ID NO: 319 - protein, 25 aa, Artificial Sequence
  Synthetic: Cathepsin B sensitive site
  misc_feature (3)..(3): Xaa can be any naturally occurring amino acid
QPXVDGFLVGGASLKPEFVDIINAK

SEQ ID NO: 320 - protein, 15 aa, Artificial Sequence
  Synthetic: Cathepsin B sensitive site
VTGDHIPTPQDLPQR

SEQ ID NO: 321 - protein, 12 aa, Artificial Sequence
  Synthetic: Cathepsin B sensitive site
YGGELVPHFPAR

SEQ ID NO: 322 - protein, 18 aa, Artificial Sequence
  Synthetic: Cathepsin B sensitive site
YQGAGGPGPGGFGAQGPK

SEQ ID NO: 323 - protein, 19 aa, Artificial Sequence
  Synthetic: Cathepsin B sensitive site
EYFGGFGEVESIELPMDNK

SEQ ID NO: 324 - protein, 15 aa, Artificial Sequence
  Synthetic: Cathepsin B sensitive site
ALVLGGFAHMDTETK

SEQ ID NO: 325 - protein, 18 aa, Artificial Sequence
  Synthetic: Cathepsin B sensitive site
VSHVSTGGGASLELLEGK

SEQ ID NO: 326 - protein, 19 aa, Artificial Sequence
  Synthetic: Cathepsin B sensitive site
AEGGGGGGRPGAPAAGDGK

SEQ ID NO: 327 - protein, 17 aa, Artificial Sequence
  Synthetic: Cathepsin B sensitive site
RGGGGGGSGGIGYPYPR

SEQ ID NO: 328 - protein, 23 aa, Artificial Sequence
  Synthetic: Cathepsin B sensitive site
NMGGPYGGGNYGPGGSGGSGGYG

SEQ ID NO: 329 - protein, 21 aa, Artificial Sequence
  Synthetic: Cathepsin B sensitive site
GTGGVDTAATGGVFDISNLDR

SEQ ID NO: 330 - protein, 16 aa, Artificial Sequence
  Synthetic: Cathepsin B sensitive site
HFNALGGWGELQNSVK

SEQ ID NO: 331 - protein, 25 aa, Artificial Sequence
  Synthetic: Cathepsin B sensitive site
PESCSFGYHAGGWGKPPVDETGKPL

SEQ ID NO: 332 - protein, 15 aa, Artificial Sequence
  Synthetic: Cathepsin B sensitive site
SSLPNFCGIFNHLER

SEQ ID NO: 333 - protein, 19 aa, Artificial Sequence
  Synthetic: Cathepsin B sensitive site
  misc_feature (5)..(5): Xaa can be any naturally occurring amino acid
AMALXGGIGFIHHNCTPEF

SEQ ID NO: 334 - protein, 23 aa, Artificial Sequence
  Synthetic: Cathepsin B sensitive site
  misc_feature (5)..(5): Xaa can be any naturally occurring amino acid
AMALXGGIGFIHHNCTPEFQANE

SEQ ID NO: 335 - protein, 22 aa, Artificial Sequence
  Synthetic: Cathepsin B sensitive site
EWIKPIMFSGGIGSMEADHISK

SEQ ID NO: 336 - protein, 14 aa, Artificial Sequence
  Synthetic: Cathepsin B sensitive site
GDGPVQGIINFEQK

SEQ ID NO: 337 - protein, 19 aa, Artificial Sequence
  Synthetic: Cathepsin B sensitive site
EMAPVCAVVGGILAQEIVK

SEQ ID NO: 338 - protein, 14 aa, Artificial Sequence
  Synthetic: Cathepsin B sensitive site
LAFHGILLHGLEDR

SEQ ID NO: 339 - protein, 14 aa, Artificial Sequence
  Synthetic: Cathepsin B sensitive site
MGVVAGILVQNVLK

SEQ ID NO: 340 - protein, 20 aa, Artificial Sequence
  Synthetic: Cathepsin B sensitive site
FTASAGIQVVGDDLTVTNPK

SEQ ID NO: 341 - protein, 21 aa, Artificial Sequence
  Synthetic: Cathepsin B sensitive site
TPYQIACGISQGLADNTVIAK

SEQ ID NO: 342 - protein, 16 aa, Artificial Sequence
  Synthetic: Cathepsin B sensitive site
YPIEHGIVTNWDDMEK

SEQ ID NO: 343 - protein, 21 aa, Artificial Sequence
  Synthetic: Cathepsin B sensitive site
  misc_feature (10)..(10): Xaa can be any naturally occurring amino acid
VASGIPAGWXGLDCGPESSKK

SEQ ID NO: 344 - protein, 16 aa, Artificial Sequence
  Synthetic: Cathepsin B sensitive site
LFVGGLDWSTTQETLR

SEQ ID NO: 345 - protein, 16 aa, Artificial Sequence
  Synthetic: Cathepsin B sensitive site
HGGSLGLGLAAMGTAR

SEQ ID NO: 346 - protein, 16 aa, Artificial Sequence
  Synthetic: Cathepsin B sensitive site
IFVGGLSANTVVEDVK

SEQ ID NO: 347 - protein, 16 aa, Artificial Sequence
  Synthetic: Cathepsin B sensitive site
LFIGGLSFETTDDSLR

SEQ ID NO: 348 - protein, 16 aa, Artificial Sequence
  Synthetic: Cathepsin B sensitive site
LFIGGLSFETTDESLR

SEQ ID NO: 349 - protein, 16 aa, Artificial Sequence
  Synthetic: Cathepsin B sensitive site
LFIGGLSFETTEESLR

SEQ ID NO: 350 - protein, 13 aa, Artificial Sequence
  Synthetic: Cathepsin B sensitive site
  misc_feature (3)..(3): Xaa can be any naturally occurring amino acid
MFXGGLSWDTSKK

SEQ ID NO: 351 - protein, 15 aa, Artificial Sequence
  Synthetic: Cathepsin B sensitive site
DAVSGMGVIVHIIEK

SEQ ID NO: 352 - protein, 10 aa, Artificial Sequence
  Synthetic: Cathepsin B sensitive site
GGNFGFGDSR

SEQ ID NO: 353 - protein, 26 aa, Artificial Sequence
  Synthetic: Cathepsin B sensitive site
GTTGSGAGSGGPGGLTSAAPAGGDKK

SEQ ID NO: 354 - protein, 23 aa, Artificial Sequence
  Synthetic: Cathepsin B sensitive site
IISGLYQGAGGPGPGGFGAQGPK

SEQ ID NO: 355 - protein, 23 aa, Artificial Sequence
  Synthetic: Cathepsin B sensitive site
IISGLYQGAGGPGPGGFGAQGPK

SEQ ID NO: 356 - protein, 22 aa, Artificial Sequence
  Synthetic: Cathepsin B sensitive site
GGGLLIGGQAWDWANQGEDERV

SEQ ID NO: 357 - protein, 23 aa, Artificial Sequence
  Synthetic: Cathepsin B sensitive site
GNFGGSFAGSFGGAGGHAPGVAR

SEQ ID NO: 358 - protein, 22 aa, Artificial Sequence
  Synthetic: Cathepsin B sensitive site
NFGGSFAGSFGGAGGHAPGVAR

SEQ ID NO: 359 - protein, 33 aa, Artificial Sequence
  Synthetic: Cathepsin B sensitive site
SAADTKPGTTGSGAGSGGPGGLTSAAPAGGDKK

SEQ ID NO: 360 - protein, 36 aa, Artificial Sequence
  Synthetic: Cathepsin B sensitive site
AATQGAAAAAGSGAGTGGGTASGGTEGGSAESEGAK

SEQ ID NO: 361 - protein, 19 aa, Artificial Sequence
  Synthetic: Cathepsin B sensitive site
GSSGGSGAKPSDAASEAAR

SEQ ID NO: 362 - protein, 21 aa, Artificial Sequence
  Synthetic: Cathepsin B sensitive site
IQFHFHWGSLDGQGSEHTVDK

SEQ ID NO: 363 - protein, 18 aa, Artificial Sequence
  Synthetic: Cathepsin B sensitive site
MILIQDGSQNTNVDKPLR

SEQ ID NO: 364 - protein, 10 aa, Artificial Sequence
  Synthetic: Cathepsin B sensitive site
KGTFTDDLHK

SEQ ID NO: 365 - protein, 25 aa, Artificial Sequence
  Synthetic: Cathepsin B sensitive site
QQSHFAMMHGGTGFAGIDSSSPEVK

SEQ ID NO: 366 - protein, 20 aa, Artificial Sequence
  Synthetic: Cathepsin B sensitive site
VAVLISGTGSNLQALIDSTR

SEQ ID NO: 367 - protein, 16 aa, Artificial Sequence
  Synthetic: Cathepsin B sensitive site
FLAAGTHLGGTNLDFQ

SEQ ID NO: 368 - protein, 14 aa, Artificial Sequence
  Synthetic: Cathepsin B sensitive site
LVLGTHTSDEQNHL

SEQ ID NO: 369 - protein, 20 aa, Artificial Sequence
  Synthetic: Cathepsin B sensitive site
TGGVDTAATGGVFDISNLDR

SEQ ID NO: 370 - protein, 20 aa, Artificial Sequence
  Synthetic: Cathepsin B sensitive site
TGGVDTAAVGGVFDVSNADR

SEQ ID NO: 371 - protein, 18 aa, Artificial Sequence
  Synthetic: Cathepsin B sensitive site
  misc_feature (3)..(3): Xaa can be any naturally occurring amino acid
AVXIVAAGVGEFEAGISK

SEQ ID NO: 372 - protein, 20 aa, Artificial Sequence
  Synthetic: Cathepsin B sensitive site
EILTLLQGVHQGAGFQDIPK

SEQ ID NO: 373 - protein, 17 aa, Artificial Sequence
  Synthetic: Cathepsin B sensitive site
MKPLMGVIYVPLTDKEK

SEQ ID NO: 374 - protein, 20 aa, Artificial Sequence
  Synthetic: Cathepsin B sensitive site
  misc_feature (5)..(5): Xaa can be any naturally occurring amino acid
ECISXHVGQAGVQIGNACWE

SEQ ID NO: 375 - protein, 16 aa, Artificial Sequence
  Synthetic: Cathepsin B sensitive site
HFNALGGWGELQNSVK

SEQ ID NO: 376 - protein, 24 aa, Artificial Sequence
  Synthetic: Cathepsin B sensitive site
ESCSFGYHAGGWGKPPVDETGKPL

SEQ ID NO: 377 - protein, 9 aa, Artificial Sequence
  Synthetic: Cathepsin B sensitive site
AGYVTHLMK

SEQ ID NO: 378 - protein, 26 aa, Artificial Sequence
  Synthetic: Cathepsin B sensitive site
TMFSSEVQFGHAGACANQASETAVAK

SEQ ID NO: 379 - protein, 17 aa, Artificial Sequence
  Synthetic: Cathepsin B sensitive site
MPFPVNHGASSEDTLLK

SEQ ID NO: 380 - protein, 18 aa, Artificial Sequence
  Synthetic: Cathepsin B sensitive site
FFLHHLIAEIHTAEIRAT

SEQ ID NO: 381 - protein, 17 aa, Artificial Sequence
  Synthetic: Cathepsin B sensitive site
  misc_feature (2)..(2): Xaa can be any naturally occurring amino acid
  misc_feature (5)..(5): Xaa can be any naturally occurring amino acid
NXSAXQVLIEHIGNLDR

SEQ ID NO: 382 - protein, 15 aa, Artificial Sequence
  Synthetic: Cathepsin B sensitive site
GGYVLHIGTIYGDLK

SEQ ID NO: 383 - protein, 12 aa, Artificial Sequence
  Synthetic: Cathepsin B sensitive site
  misc_feature (2)..(2): Xaa can be any naturally occurring amino acid
DXHLGGEDFDNR

SEQ ID NO: 384 - protein, 20 aa, Artificial Sequence
  Synthetic: Cathepsin B sensitive site
GILGPPPPSFHLGGPAVGPR

SEQ ID NO: 385 - protein, 19 aa, Artificial Sequence
  Synthetic: Cathepsin B sensitive site
PTPPPTLHLVPEPAAPPPP

SEQ ID NO: 386 - protein, 25 aa, Artificial Sequence
  Synthetic: Cathepsin B sensitive site
YGPQYGHPPPPPPPPEYGPHADSPV

SEQ ID NO: 387 - protein, 17 aa, Artificial Sequence
  Synthetic: Cathepsin B sensitive site
KHSGPNSADSANDGFVR

SEQ ID NO: 388 - protein, 16 aa, Artificial Sequence
  Synthetic: Cathepsin B sensitive site
RPELLTHSTTEVTQPR

SEQ ID NO: 389 - protein, 17 aa, Artificial Sequence
  Synthetic: Cathepsin B sensitive site
  misc_feature (2)..(2): Xaa can be any naturally occurring amino acid
LXGHVGFDSLPDQLVNK

SEQ ID NO: 390 - protein, 19 aa, Artificial Sequence
  Synthetic: Cathepsin B sensitive site
AASATQTIAAAQHAASTPK

SEQ ID NO: 391 - protein, 14 aa, Artificial Sequence
  Synthetic: Cathepsin B sensitive site
CLTQSGIAGGYKPF

SEQ ID NO: 392 - protein, 18 aa, Artificial Sequence
  Synthetic: Cathepsin B sensitive site
ELAQIAGRPTEDEDEKEK

SEQ ID NO: 393 - protein, 16 aa, Artificial Sequence
  Synthetic: Cathepsin B sensitive site
AITIAGVPQSVTECVK

SEQ ID NO: 394 - protein, 12 aa, Artificial Sequence
  Synthetic: Cathepsin B sensitive site
GLCAIAQAESLR

SEQ ID NO: 395 - protein, 21 aa, Artificial Sequence
  Synthetic: Cathepsin B sensitive site
KPTALIGVAAIGGAFSEQILK

SEQ ID NO: 396 - protein, 21 aa, Artificial Sequence
  Synthetic: Cathepsin B sensitive site
DYMNVQCHACIGGTNVGEDIR

SEQ ID NO: 397 - protein, 23 aa, Artificial Sequence
  Synthetic: Cathepsin B sensitive site
NTQNFQSLHNIGSVVQHSEGKPL

SEQ ID NO: 398 - protein, 22 aa, Artificial Sequence
  Synthetic: Cathepsin B sensitive site
LKPPTLIHGQAPSAGLPSQKPK

SEQ ID NO: 399 - protein, 13 aa, Artificial Sequence
  Synthetic: Cathepsin B sensitive site
VLIIGGGDGGVLR

SEQ ID NO: 400 - protein, 17 aa, Artificial Sequence
  Synthetic: Cathepsin B sensitive site
GCITIIGGGDTATCCAK

SEQ ID NO: 401 - protein, 17 aa, Artificial Sequence
  Synthetic: Cathepsin B sensitive site
GRPSETGIIGIIDPECR

SEQ ID NO: 402 - protein, 20 aa, Artificial Sequence
  Synthetic: Cathepsin B sensitive site
EAFGWHAIIVDGHSVEELCK

SEQ ID NO: 403 - protein, 17 aa, Artificial Sequence
  Synthetic: Cathepsin B sensitive site
LAAAILGGVDQIHIKPG

SEQ ID NO: 404 - protein, 14 aa, Artificial Sequence
  Synthetic: Cathepsin B sensitive site
LYSILGTTLKDEGK

SEQ ID NO: 405 - protein, 18 aa, Artificial Sequence
  Synthetic: Cathepsin B sensitive site
MILIQDGSQNTNVDKPLR

SEQ ID NO: 406 - protein, 17 aa, Artificial Sequence
  Synthetic: Cathepsin B sensitive site
LAMQEFMILPVGAANFR

SEQ ID NO: 407 - protein, 18 aa, Artificial Sequence
  Synthetic: Cathepsin B sensitive site
VPYLIAGIQHSCQDIGAK

SEQ ID NO: 408 - protein, 18 aa, Artificial Sequence
  Synthetic: Cathepsin B sensitive site
TVAGGVHISGLHTESAPR

SEQ ID NO: 409 - protein, 20 aa, Artificial Sequence
  Synthetic: Cathepsin B sensitive site
VAVLISGTGSNLQALIDSTR

SEQ ID NO: 410 - protein, 25 aa, Artificial Sequence
  Synthetic: Cathepsin B sensitive site
GITAIGGTSTISSEGTQHSYSEEEK

SEQ ID NO: 411 - protein, 18 aa, Artificial Sequence
  Synthetic: Cathepsin B sensitive site
AGVSISVVHGNLSEEAAK

SEQ ID NO: 412 - protein, 26 aa, Artificial Sequence
  Synthetic: Cathepsin B sensitive site
HVTQAHVQTGITAAPPPHPGAPHPPQ

SEQ ID NO: 413 - protein, 21 aa, Artificial Sequence
  Synthetic: Cathepsin B sensitive site
AGLFLPGSVGITDPCESGNFR

SEQ ID NO: 414 - protein, 16 aa, Artificial Sequence
  Synthetic: Cathepsin B sensitive site
AFAHITGGGLLENIPR

SEQ ID NO: 415 - protein, 12 aa, Artificial Sequence
  Synthetic: Cathepsin B sensitive site
ILAQITGTEHLK

SEQ ID NO: 416 - protein, 16 aa, Artificial Sequence
  Synthetic: Cathepsin B sensitive site
  misc_feature (3)..(3): Xaa can be any naturally occurring amino acid
TFXNITPAEVGVLVGK

SEQ ID NO: 417 - protein, 15 aa, Artificial Sequence
  Synthetic: Cathepsin B sensitive site
HSSGIVADLSEQSLK

SEQ ID NO: 418 - protein, 23 aa, Artificial Sequence
  Synthetic: Cathepsin B sensitive site
EDGNEEDKENQGDETQGQQPPQR

SEQ ID NO: 419 - protein, 22 aa, Artificial Sequence
  Synthetic: Cathepsin B sensitive site
PGPSGITIPGKPGAQGVPGPPG

SEQ ID NO: 420 - protein, 22 aa, Artificial Sequence
  Synthetic: Cathepsin B sensitive site
GLTKPAALAAAPAKPGGAGGSK

SEQ ID NO: 421 - protein, 13 aa, Artificial Sequence
  Synthetic: Cathepsin B sensitive site
LGAQLADLHLDNK

SEQ ID NO: 422 - protein, 18 aa, Artificial Sequence
  Synthetic: Cathepsin B sensitive site
SLVASLAEPDFVVTDFAK

SEQ ID NO: 423 - protein, 19 aa, Artificial Sequence
  Synthetic: Cathepsin B sensitive site
MSLPLLAGGVADDINTNKK

SEQ ID NO: 424 - protein, 22 aa, Artificial Sequence
  Synthetic: Cathepsin B sensitive site
QPYAVSELAGHQTSAESWGTGR

SEQ ID NO: 425 - protein, 14 aa, Artificial Sequence
  Synthetic: Cathepsin B sensitive site
VTVAGLAGKDPVQC

SEQ ID NO: 426 - protein, 13 aa, Artificial Sequence
  Synthetic: Cathepsin B sensitive site
IITLAGPTNAIFK

SEQ ID NO: 427 - protein, 14 aa, Artificial Sequence
  Synthetic: Cathepsin B sensitive site
STHGLAILGPENPK

SEQ ID NO: 428 - protein, 15 aa, Artificial Sequence
  Synthetic: Cathepsin B sensitive site
ASAELALGENSEVLK

SEQ ID NO: 429 - protein, 19 aa, Artificial Sequence
  Synthetic: Cathepsin B sensitive site
ILISLATGHREEGGENLDQ

SEQ ID NO: 430 - protein, 18 aa, Artificial Sequence
  Synthetic: Cathepsin B sensitive site
AMSRPFGVALLFGGVDEK

SEQ ID NO: 431 - protein, 21 aa, Artificial Sequence
  Synthetic: Cathepsin B sensitive site
LQATAHAQAQLGCPVIIHPGR

SEQ ID NO: 432 - protein, 16 aa, Artificial Sequence
  Synthetic: Cathepsin B sensitive site
ILAGLGFDPEMQNRPT

SEQ ID NO: 433 - protein, 32 aa, Artificial Sequence
  Synthetic: Cathepsin B sensitive site
PERPQQLPHGLGGIGMGLGPGGQPIDANHLNK

SEQ ID NO: 434 - protein, 24 aa, Artificial Sequence
  Synthetic: Cathepsin B sensitive site
QLMQLIGPAGLGGLGGLGALTGPG

SEQ ID NO: 435 - protein, 16 aa, Artificial Sequence
  Synthetic: Cathepsin B sensitive site
HFNALGGWGELQNSVK

SEQ ID NO: 436 - protein, 11 aa, Artificial Sequence
  Synthetic: Cathepsin B sensitive site
MGAGLGHGMDR

SEQ ID NO: 437 - protein, 22 aa, Artificial Sequence
  Synthetic: Cathepsin B sensitive site
THMTAIVGMALGHRPIPNQPPT

SEQ ID NO: 438 - protein, 25 aa, Artificial Sequence
  Synthetic: Cathepsin B sensitive site
PHGLGGIGMGLGPGGQPIDANHLNK

SEQ ID NO: 439 - protein, 19 aa, Artificial Sequence
  Synthetic: Cathepsin B sensitive site
ASQGDSISSQLGPIHPPPR

SEQ ID NO: 440 - protein, 18 aa, Artificial Sequence
  Synthetic: Cathepsin B sensitive site
VWQLGSSSPNFTLEGHEK

SEQ ID NO: 441 - protein, 12 aa, Artificial Sequence
  Synthetic: Cathepsin B sensitive site
YVATLGVEVHPL

SEQ ID NO: 442 - protein, 13 aa, Artificial Sequence
  Synthetic: Cathepsin B sensitive site
KLIADYSPDDIFN

SEQ ID NO: 443 - protein, 13 aa, Artificial Sequence
  Synthetic: Cathepsin B sensitive site
  misc_feature (2)..(2): Xaa can be any naturally occurring amino acid
TXGLIFVVDSNDR

SEQ ID NO: 444 - protein, 17 aa, Artificial Sequence
  Synthetic: Cathepsin B sensitive site
VPEFQFLIGDEAATHLK

SEQ ID NO: 445 - protein, 18 aa, Artificial Sequence
  Synthetic: Cathepsin B sensitive site
CNINLLPLPDPIPSGLME

SEQ ID NO: 446 - protein, 22 aa, Artificial Sequence
  Synthetic: Cathepsin B sensitive site
LITEMVALNPDFKPPADYKPPA

SEQ ID NO: 447 - protein, 15 aa, Artificial Sequence
  Synthetic: Cathepsin B sensitive site
NQVALNPQNTVFDAK

SEQ ID NO: 448 - protein, 15 aa, Artificial Sequence
  Synthetic: Cathepsin B sensitive site
GLLKPGLNVVLEGPK

SEQ ID NO: 449 - protein, 17 aa, Artificial Sequence
  Synthetic: Cathepsin B sensitive site
GVNLPGAAVDLPAVSEK

SEQ ID NO: 450 - protein, 20 aa, Artificial Sequence
  Synthetic: Cathepsin B sensitive site
  misc_feature (3)..(3): Xaa can be any naturally occurring amino acid
ISXGLPVGAVINCADNTGAK

SEQ ID NO: 451 - protein, 14 aa, Artificial Sequence
  Synthetic: Cathepsin B sensitive site
GQVCLPVISAENWK

SEQ ID NO: 452 - protein, 20 aa, Artificial Sequence
  Synthetic: Cathepsin B sensitive site
EILTLLQGVHQGAGFQDIPK

SEQ ID NO: 453 - protein, 20 aa, Artificial Sequence
  Synthetic: Cathepsin B sensitive site
NNQFQALLQYADPVSAQHAK

SEQ ID NO: 454 - protein, 16 aa, Artificial Sequence
  Synthetic: Cathepsin B sensitive site
LFIGGLSFETTDDSLR

SEQ ID NO: 455 - protein, 14 aa, Artificial Sequence
  Synthetic: Cathepsin B sensitive site
AIQLSGAEQLEALK

SEQ ID NO: 456 - protein, 20 aa, Artificial Sequence
  Synthetic: Cathepsin B sensitive site
DVSIEDSVISLSGDHCIIGR

SEQ ID NO: 457 - protein, 16 aa, Artificial Sequence
  Synthetic: Cathepsin B sensitive site
EYLLSGDISEAEHCLK

SEQ ID NO: 458 - protein, 20 aa, Artificial Sequence
  Synthetic: Cathepsin B sensitive site
VVISSDGQFALSGSWDGTLR

SEQ ID NO: 459 - protein, 17 aa, Artificial Sequence
  Synthetic: Cathepsin B sensitive site
VHEQLAALSQGPISKPK

SEQ ID NO: 460 - protein, 23 aa, Artificial Sequence
  Synthetic: Cathepsin B sensitive site
  misc_feature (3)..(3): Xaa can be any naturally occurring amino acid
  misc_feature (5)..(6): Xaa can be any naturally occurring amino acid
LVXLXXETALLSSGFSLEDPQTH

SEQ ID NO: 461 - protein, 17 aa, Artificial Sequence
  Synthetic: Cathepsin B sensitive site
GPDGLTAFEATDNQAIK

SEQ ID NO: 462 - protein, 18 aa, Artificial Sequence
  Synthetic: Cathepsin B sensitive site
ALYWLSGLTCTEQNFISK

SEQ ID NO: 463 - protein, 13 aa, Artificial Sequence
  Synthetic: Cathepsin B sensitive site
IITLTGPTNAIFK

SEQ ID NO: 464 - protein, 13 aa, Artificial Sequence
  Synthetic: Cathepsin B sensitive site
LATQLTGPVMPVR

SEQ ID NO: 465 - protein, 14 aa, Artificial Sequence
  Synthetic: Cathepsin B sensitive site
FPSLLTHNENMVAK

SEQ ID NO: 466 - protein, 19 aa, Artificial Sequence
  Synthetic: Cathepsin B sensitive site
  misc_feature (3)..(3): Xaa can be any naturally occurring amino acid
  misc_feature (5)..(5): Xaa can be any naturally occurring amino acid
  misc_feature (9)..(9): Xaa can be any naturally occurring amino acid
LEXLXTINXGLTSIANLPK

SEQ ID NO: 467 - protein, 15 aa, Artificial Sequence
  Synthetic: Cathepsin B sensitive site
ALLLLLVGGVDQSPR

SEQ ID NO: 468 - protein, 18 aa, Artificial Sequence
  Synthetic: Cathepsin B sensitive site
GKPVGLVGVTELSDAQKK

SEQ ID NO: 469 - protein, 15 aa, Artificial Sequence
  Synthetic: Cathepsin B sensitive site
VNVAGLVLAGSADFK

SEQ ID NO: 470 - protein, 19 aa, Artificial Sequence
  Synthetic: Cathepsin B sensitive site
QGYIGAALVLGGVDVTGPH

SEQ ID NO: 471 - protein, 14 aa, Artificial Sequence
  Synthetic: Cathepsin B sensitive site
LYTLVLTDPDAPSR

SEQ ID NO: 472 - protein, 14 aa, Artificial Sequence
  Synthetic: Cathepsin B sensitive site
AQIHDLVLVGGSTR

SEQ ID NO: 473 - protein, 20 aa, Artificial Sequence
  Synthetic: Cathepsin B sensitive site
LNHVAAGLVSPSLKSDTSSK

SEQ ID NO: 474 - protein, 16 aa, Artificial Sequence
  Synthetic: Cathepsin B sensitive site
IEVGLVVGNSQVAFEK

SEQ ID NO: 475 - protein, 21 aa, Artificial Sequence
  Synthetic: Cathepsin B sensitive site
GYHQSASEHGLVVIAPDTSPR

SEQ ID NO: 476 - protein, 21 aa, Artificial Sequence
  Synthetic: Cathepsin B sensitive site
GYHQSASEHGLVVIAPDTSPR

SEQ ID NO: 477 - protein, 20 aa, Artificial Sequence
  Synthetic: Cathepsin B sensitive site
QDHPWLLSQNLVVKPDQLIK

SEQ ID NO: 478 - protein, 15 aa, Artificial Sequence
  Synthetic: Cathepsin B sensitive site
MGLAMGGGGGASFDR

SEQ ID NO: 479 - protein, 27 aa, Artificial Sequence
  Synthetic: Cathepsin B sensitive site
QLPHGLGGIGMGLGPGGQPIDANHLNK

SEQ ID NO: 480 - protein, 16 aa, Artificial Sequence
  Synthetic: Cathepsin B sensitive site
VVVLMGSTSDLGHCEK

SEQ ID NO: 481 - protein, 15 aa, Artificial Sequence
  Synthetic: Cathepsin B sensitive site
MALIQMGSVEEAVQA

SEQ ID NO: 482 - protein, 15 aa, Artificial Sequence
  Synthetic: Cathepsin B sensitive site
TTGFGMIYDSLDYAK

SEQ ID NO: 483 - protein, 16 aa, Artificial Sequence
  Synthetic: Cathepsin B sensitive site
WLLAEMLGDLSDSQLK

SEQ ID NO: 484 - protein, 17 aa, Artificial Sequence
  Synthetic: Cathepsin B sensitive site
QAQYLGMSCDGPFKPDH

SEQ ID NO: 485 - protein, 13 aa, Artificial Sequence
  Synthetic: Cathepsin B sensitive site
AHSSMVGVNLPQK

SEQ ID NO: 486 - protein, 16 aa, Artificial Sequence
  Synthetic: Cathepsin B sensitive site
SGPVVAMVWEGLNVVK

SEQ ID NO: 487 - protein, 24 aa, Artificial Sequence
  Synthetic: Cathepsin B sensitive site
VNTQNFQSLHNIGSVVQHSEGKPL

SEQ ID NO: 488 - protein, 12 aa, Artificial Sequence
  Synthetic: Cathepsin B sensitive site
LYVSNLGIGHTR

SEQ ID NO: 489 - protein, 17 aa, Artificial Sequence
  Synthetic: Cathepsin B sensitive site
VYVGNLGNNGNKTELER

SEQ ID NO: 490 - protein, 18 aa, Artificial Sequence
  Synthetic: Cathepsin B sensitive site
IVDLLQMLEMNMAIAFPA

SEQ ID NO: 491 - protein, 16 aa, Artificial Sequence
  Synthetic: Cathepsin B sensitive site
VLAQNSGFDLQETLVK

SEQ ID NO: 492 - protein, 25 aa, Artificial Sequence
  Synthetic: Cathepsin B sensitive site
QQSHFPMTHGNTGFSGIESSSPEVK

SEQ ID NO: 493 - protein, 14 aa, Artificial Sequence
  Synthetic: Cathepsin B sensitive site
ILIANTGMDTDKIK

SEQ ID NO: 494 - protein, 12 aa, Artificial Sequence
  Synthetic: Cathepsin B sensitive site
NNTVTPGGKPNK

SEQ ID NO: 495 - protein, 19 aa, Artificial Sequence
  Synthetic: Cathepsin B sensitive site
VVNVANVGAVPSGQDNIHR

SEQ ID NO: 496 - protein, 17 aa, Artificial Sequence
  Synthetic: Cathepsin B sensitive site
MPFPVNHGASSEDTLLK

SEQ ID NO: 497 - protein, 9 aa, Artificial Sequence
  Synthetic: Cathepsin B sensitive site
RPKDPGHPY

SEQ ID NO: 498 - protein, 15 aa, Artificial Sequence
  Synthetic: Cathepsin B sensitive site
ELDIMEPKVPDDIYK

SEQ ID NO: 499 - protein, 22 aa, Artificial Sequence
  Synthetic: Cathepsin B sensitive site
AETSQQEASEGGDPASPALSLS

SEQ ID NO: 500 - protein, 16 aa, Artificial Sequence
  Synthetic: Cathepsin B sensitive site
LLAAQNPLSQADRPHQ

SEQ ID NO: 501 - protein, 17 aa, Artificial Sequence
  Synthetic: Cathepsin B sensitive site
  misc_feature (5)..(5): Xaa can be any naturally occurring amino acid
PDNFXFGQSGAGNNWAK

SEQ ID NO: 502 - protein, 16 aa, Artificial Sequence
  Synthetic: Cathepsin B sensitive site
MIAGQVLDINLAAEPK

SEQ ID NO: 503 - protein, 22 aa, Artificial Sequence
  Synthetic: Cathepsin B sensitive site
IILNSHSPAGSAAISQQDFHPK

SEQ ID NO: 504 - protein, 26 aa, Artificial Sequence
  Synthetic: Cathepsin B sensitive site
GAVAVSAAPGSAAPAAGSAPAAAEEK

SEQ ID NO: 505 - protein, 47 aa, Artificial Sequence
  Synthetic: Cathepsin B sensitive site
SAAGAAGSAGGSSGAAGAAGGGAGAGTRPGDGGTASAGAAGPGAATK

SEQ ID NO: 506 - protein, 20 aa, Artificial Sequence
  Synthetic: Cathepsin B sensitive site
FTASAGIQVVGDDLTVTNPK

SEQ ID NO: 507 - protein, 20 aa, Artificial Sequence
  Synthetic: Cathepsin B sensitive site
FGIVTSSAGTGTTEDTEAKK

SEQ ID NO: 508 - protein, 24 aa, Artificial Sequence
  Synthetic: Cathepsin B sensitive site
SLYQSAGVAPESFEYIEAHGTGTK

SEQ ID NO: 509 - protein, 13 aa, Artificial Sequence
  Synthetic: Cathepsin B sensitive site
VSEIDEMFEARKM

SEQ ID NO: 510 - protein, 18 aa, Artificial Sequence
  Synthetic: Cathepsin B sensitive site
FGGSFAGSFGGAGGHAPG

SEQ ID NO: 511 - protein, 21 aa, Artificial Sequence
  Synthetic: Cathepsin B sensitive site
FGGSFAGSFGGAGGHAPGVAR

SEQ ID NO: 512 - protein, 32 aa, Artificial Sequence
  Synthetic: Cathepsin B sensitive site
AADTKPGTTGSGAGSGGPGGLTSAAPAGGDKK

SEQ ID NO: 513 - protein, 35 aa, Artificial Sequence
  Synthetic: Cathepsin B sensitive site
ATQGAAAAAGSGAGTGGGTASGGTEGGSAESEGAK

SEQ ID NO: 514 - protein, 15 aa, Artificial Sequence
  Synthetic: Cathepsin B sensitive site
EIELIGSGGFGQVFK

SEQ ID NO: 515 - protein, 28 aa, Artificial Sequence
  Synthetic: Cathepsin B sensitive site
KPGTTGSGAGSGGPGGLTSAAPAGGDKK

SEQ ID NO: 516 - protein, 20 aa, Artificial Sequence
  Synthetic: Cathepsin B sensitive site
  misc_feature (5)..(5): Xaa can be any naturally occurring amino acid
  misc_feature (7)..(7): Xaa can be any naturally occurring amino acid
LYANXVXSGGTTMYPGIADR

SEQ ID NO: 517 - protein, 10 aa, Artificial Sequence
  Synthetic: Cathepsin B sensitive site
RSGKYDLDFK

SEQ ID NO: 518 - protein, 16 aa, Artificial Sequence
  Synthetic: Cathepsin B sensitive site
HDGYGSHGPLLPLPSR

SEQ ID NO: 519 - protein, 13 aa, Artificial Sequence
  Synthetic: Cathepsin B sensitive site
SLFSSIGEVESAK

SEQ ID NO: 520 - protein, 13 aa, Artificial Sequence
  Synthetic: Cathepsin B sensitive site
LQSIGTENTEENR

SEQ ID NO: 521 - protein, 18 aa, Artificial Sequence
  Synthetic: Cathepsin B sensitive site
SLVASLAEPDFVVTDFAK

SEQ ID NO: 522 - protein, 21 aa, Artificial Sequence
  Synthetic: Cathepsin B sensitive site
AEPMGEKPVGSLAGIGEVLGK

SEQ ID NO: 523 - protein, 15 aa, Artificial Sequence
  Synthetic: Cathepsin B sensitive site
VQEAINSLGGSVFPK

SEQ ID NO: 524 - protein, 24 aa, Artificial Sequence
  Synthetic: Cathepsin B sensitive site
SAAAASAASGSPGPGEGSAGGEKR

SEQ ID NO: 525 - protein, 19 aa, Artificial Sequence
  Synthetic: Cathepsin B sensitive site
QTIDNSQGAYQEAFDISKK

SEQ ID NO: 526 - protein, 19 aa, Artificial Sequence
  Synthetic: Cathepsin B sensitive site
FGIVTSSAGTGTTEDTEAK

SEQ ID NO: 527 - protein, 20 aa, Artificial Sequence
  Synthetic: Cathepsin B sensitive site
FGIVTSSAGTGTTEDTEAKK

SEQ ID NO: 528 - protein, 12 aa, Artificial Sequence
  Synthetic: Cathepsin B sensitive site
  misc_feature (1)..(1): Xaa can be any naturally occurring amino acid
XSSFDLDYDFQR

SEQ ID NO: 529 - protein, 21 aa, Artificial Sequence
  Synthetic: Cathepsin B sensitive site
FQAGTSKPLHSSGINVNAAPF

SEQ ID NO: 530 - protein, 21 aa, Artificial Sequence
  Synthetic: Cathepsin B sensitive site
HIGGPPGFASSSGKPGPTVIK

SEQ ID NO: 531 - protein, 21 aa, Artificial Sequence
  Synthetic: Cathepsin B sensitive site
  misc_feature (1)..(1): Xaa can be any naturally occurring amino acid
XSSGPGASSGTSGDHGELVVR

SEQ ID NO: 532 - protein, 19 aa, Artificial Sequence
  Synthetic: Cathepsin B sensitive site
ELVSSSSSGSDSDSEVDKK

SEQ ID NO: 533 - protein, 12 aa, Artificial Sequence
  Synthetic: Cathepsin B sensitive site
MDSTEPPYSQKR

SEQ ID NO: 534 - protein, 16 aa, Artificial Sequence
  Synthetic: Cathepsin B sensitive site
VVVLMGSTSDLGHCEK

SEQ ID NO: 535 - protein, 16 aa, Artificial Sequence
  Synthetic: Cathepsin B sensitive site
ILDSVGIEADDDRLNK

SEQ ID NO: 536 - protein, 16 aa, Artificial Sequence
  Synthetic: Cathepsin B sensitive site
STQPISSVGKPASVIK

SEQ ID NO: 537 - protein, 14 aa, Artificial Sequence
  Synthetic: Cathepsin B sensitive site
ALQSVGQIVGEVLK

SEQ ID NO: 538 - protein, 22 aa, Artificial Sequence
  Synthetic: Cathepsin B sensitive site
VSSLAEGSVTSVGSVNPAENFR

SEQ ID NO: 539 - protein, 16 aa, Artificial Sequence
  Synthetic: Cathepsin B sensitive site
TGSISSSVSVPAKPER

SEQ ID NO: 540 - protein, 19 aa, Artificial Sequence
  Synthetic: Cathepsin B sensitive site
  misc_feature (2)..(7): Xaa can be any naturally occurring amino acid
YXXXXXXYSQSYGGYENQK

SEQ ID NO: 541 - protein, 13 aa, Artificial Sequence
  Synthetic: Cathepsin B sensitive site
IYWGTATTGKPHV

SEQ ID NO: 542 - protein, 11 aa, Artificial Sequence
  Synthetic: Cathepsin B sensitive site
MVQTAVVPVKK

SEQ ID NO: 543 - protein, 14 aa, Artificial Sequence
  Synthetic: Cathepsin B sensitive site
MMLGTEGGEGFVVK

SEQ ID NO: 544 - protein, 13 aa, Artificial Sequence
  Synthetic: Cathepsin B sensitive site
  misc_feature (1)..(1): Xaa can be any naturally occurring amino acid
XTFIAIKPDGVQR

SEQ ID NO: 545 - protein, 18 aa, Artificial Sequence
  Synthetic: Cathepsin B sensitive site
VSHVSTGGGASLELLEGK

SEQ ID NO: 546 - protein, 31 aa, Artificial Sequence
  Synthetic: Cathepsin B sensitive site
AAAAAGSGAGTGGGTASGGTEGGSAESEGAK

SEQ ID NO: 547 - protein, 21 aa, Artificial Sequence
  Synthetic: Cathepsin B sensitive site
TIGNSCGTIGLIHAVANNQDK

SEQ ID NO: 548 - protein, 16 aa, Artificial Sequence
  Synthetic: Cathepsin B sensitive site
TGEEIFGTIGMRPNAK

SEQ ID NO: 549 - protein, 20 aa, Artificial Sequence
  Synthetic: Cathepsin B sensitive site
TTQFSCTLGEKFEETTADGR

SEQ ID NO: 550 - protein, 11 aa, Artificial Sequence
  Synthetic: Cathepsin B sensitive site
GCTATLGNFAK

SEQ ID NO: 551 - protein, 12 aa, Artificial Sequence
  Synthetic: Cathepsin B sensitive site
YVATLGVEVHPL

SEQ ID NO: 552 - protein, 15 aa, Artificial Sequence
  Synthetic: Cathepsin B sensitive site
LAATNALLNSLEFTK

SEQ ID NO: 553 - protein, 18 aa, Artificial Sequence
  Synthetic: Cathepsin B sensitive site
GPGASSGTSGDHGELVVR

SEQ ID NO: 554 - protein, 10 aa, Artificial Sequence
  Synthetic: Cathepsin B sensitive site
STTTGHLIYK

SEQ ID NO: 555 - protein, 35 aa, Artificial Sequence
  Synthetic: Cathepsin B sensitive site
ALSAADTKPGTTGSGAGSGGPGGLTSAAPAGGDKK

SEQ ID NO: 556 - protein, 10 aa, Artificial Sequence
  Synthetic: Cathepsin B sensitive site
STTTGHLIYK

SEQ ID NO: 557 - protein, 18 aa, Artificial Sequence
  Synthetic: Cathepsin B sensitive site
VTIIGPATVGGIKPGCFK

SEQ ID NO: 558 - protein, 22 aa, Artificial Sequence
  Synthetic: Cathepsin B sensitive site
TVVFSHPPIGTVGLTEDEAIHK

SEQ ID NO: 559 - protein, 19 aa, Artificial Sequence
  Synthetic: Cathepsin B sensitive site
GSPTSLGTWGSWIGPDHDK

SEQ ID NO: 560 - protein, 20 aa, Artificial Sequence
  Synthetic: Cathepsin B sensitive site
GSPTSLGTWGSWIGPDHDKF

SEQ ID NO: 561 - protein, 16 aa, Artificial Sequence
  Synthetic: Cathepsin B sensitive site
IHFPLATYAPVISAEK

SEQ ID NO: 562 - protein, 13 aa, Artificial Sequence
  Synthetic: Cathepsin B sensitive site
ANPQVGVAFPHIK

SEQ ID NO: 563 - protein, 15 aa, Artificial Sequence
  Synthetic: Cathepsin B sensitive site
TCTTVAFTQVNSEDK

SEQ ID NO: 564 - protein, 16 aa, Artificial Sequence
  Synthetic: Cathepsin B sensitive site
VLTGVAGEDAECHAAK

SEQ ID NO: 565 - protein, 20 aa, Artificial Sequence
  Synthetic: Cathepsin B sensitive site
NIPPYFVALVPQEEELDDQK

SEQ ID NO: 566 - protein, 19 aa, Artificial Sequence
  Synthetic: Cathepsin B sensitive site
GQETAVAPSLVAPALNKPK

SEQ ID NO: 567 - protein, 20 aa, Artificial Sequence
  Synthetic: Cathepsin B sensitive site
QGQETAVAPSLVAPALNKPK

SEQ ID NO: 568 - protein, 20 aa, Artificial Sequence
  Synthetic: Cathepsin B sensitive site
GFVTFSSMAEVDAAMAARPH

SEQ ID NO: 569 - protein, 17 aa, Artificial Sequence
  Synthetic: Cathepsin B sensitive site
VDYYTTTPALVFGKPVR

SEQ ID NO: 570 - protein, 17 aa, Artificial Sequence
  Synthetic: Cathepsin B sensitive site
VDYYTTTPALVFGKPVR

SEQ ID NO: 571 - protein, 27 aa, Artificial Sequence
  Synthetic: Cathepsin B sensitive site
  misc_feature (5)..(5): Xaa can be any naturally occurring amino acid
ASQPXVDGFLVGGASLKPEFVDIINAK

SEQ ID NO: 572 - protein, 17 aa, Artificial Sequence
  Synthetic: Cathepsin B sensitive site
TIIGPATVGGIKPGCFK

SEQ ID NO: 573 - protein, 19 aa, Artificial Sequence
  Synthetic: Cathepsin B sensitive site
GGVDTAAVGGVFDVSNADR

SEQ ID NO: 574 - protein, 11 aa, Artificial Sequence
  Synthetic: Cathepsin B sensitive site
TTVHAITATQK

SEQ ID NO: 575 - protein, 20 aa, Artificial Sequence
  Synthetic: Cathepsin B sensitive site
EEVRPQDTVSVIGGVAGGSK

SEQ ID NO: 576 - protein, 11 aa, Artificial Sequence
  Synthetic: Cathepsin B sensitive site
QVIGTGSFFPK

SEQ ID NO: 577 - protein, 16 aa, Artificial Sequence
  Synthetic: Cathepsin B sensitive site
ASGNYATVISHNPETK

SEQ ID NO: 578 - protein, 17 aa, Artificial Sequence
  Synthetic: Cathepsin B sensitive site
MKPLMGVIYVPLTDKEK

SEQ ID NO: 579 - protein, 16 aa, Artificial Sequence
  Synthetic: Cathepsin B sensitive site
FSVCVLGDQQHCDEAK

SEQ ID NO: 580 - protein, 21 aa, Artificial Sequence
  Synthetic: Cathepsin B sensitive site
ENAFCNLAAIVPDSVGRHSPA

SEQ ID NO: 581 - protein, 20 aa, Artificial Sequence
  Synthetic: Cathepsin B sensitive site
AYVGNLPFNTVQGDIDAIFK

SEQ ID NO: 582 - protein, 15 aa, Artificial Sequence
  Synthetic: Cathepsin B sensitive site
TLTTVQGIADDYDKK

SEQ ID NO: 583 - protein, 19 aa, Artificial Sequence
  Synthetic: Cathepsin B sensitive site
  misc_feature (4)..(4): Xaa can be any naturally occurring amino acid
CISXHVGQAGVQIGNACWE

SEQ ID NO: 584 - protein, 23 aa, Artificial Sequence
  Synthetic: Cathepsin B sensitive site
THALQWPSLTVQWLPEVTKPEGK

SEQ ID NO: 585 - protein, 32 aa, Artificial Sequence
  Synthetic: Cathepsin B sensitive site
ASVPAGGAVAVSAAPGSAAPAAGSAPAAAEEK

SEQ ID NO: 586 - protein, 14 aa, Artificial Sequence
  Synthetic: Cathepsin B sensitive site
YEEVSVSGFEEFHR

SEQ ID NO: 587 - protein, 17 aa, Artificial Sequence
  Synthetic: Cathepsin B sensitive site
CMTTVSWDGDKLQCVQK

SEQ ID NO: 588 - protein, 16 aa, Artificial Sequence
  Synthetic: Cathepsin B sensitive site
MHGGGPTVTAGLPLPK

SEQ ID NO: 589 - protein, 20 aa, Artificial Sequence
  Synthetic: Cathepsin B sensitive site
LALVTGGEIASTFDHPELVK

SEQ ID NO: 590 - protein, 20 aa, Artificial Sequence
  Synthetic: Cathepsin B sensitive site
LEGTLLKPNMVTPGHACTQK

SEQ ID NO: 591 - protein, 11 aa, Artificial Sequence
  Synthetic: Cathepsin B sensitive site
  misc_feature (1)..(1): Xaa can be any naturally occurring amino acid
XVVESAYEVIK

SEQ ID NO: 592 - protein, 15 aa, Artificial Sequence
  Synthetic: Cathepsin B sensitive site
ILAQVVGDVDTSLPR

SEQ ID NO: 593 - protein, 22 aa, Artificial Sequence
  Synthetic: Cathepsin B sensitive site
CFSEMAPVCAVVGGILAQEIVK

SEQ ID NO: 594 - protein, 20 aa, Artificial Sequence
  Synthetic: Cathepsin B sensitive site
  misc_feature (7)..(7): Xaa can be any naturally occurring amino acid
ETEDTFXADLVVGLCTGQIK

SEQ ID NO: 595 - protein, 14 aa, Artificial Sequence
  Synthetic: Cathepsin B sensitive site
EGPAVVGQFIQDVK

SEQ ID NO: 596 - protein, 19 aa, Artificial Sequence
  Synthetic: Cathepsin B sensitive site
MLISGYALNCVVGSQGMPK

SEQ ID NO: 597 - protein, 14 aa, Artificial Sequence
  Synthetic: Cathepsin B sensitive site
HWPFMVVNDAGRPK

SEQ ID NO: 598 - protein, 16 aa, Artificial Sequence
  Synthetic: Cathepsin B sensitive site
SGPVVAMVWEGLNVVK

SEQ ID NO: 599 - protein, 18 aa, Artificial Sequence
  Synthetic: Cathepsin B sensitive site
ALQDEWDAVMLHSFTLRQ

SEQ ID NO: 600 - protein, 14 aa, Artificial Sequence
  Synthetic: Cathepsin B sensitive site
EYFSWEGAFQHVGK

SEQ ID NO: 601 - protein, 22 aa, Artificial Sequence
  Synthetic: Cathepsin B sensitive site
ATVASGIPAGWMGLDCGPESSK

SEQ ID NO: 602 - protein, 23 aa, Artificial Sequence
  Synthetic: Cathepsin B sensitive site
ATVASGIPAGWMGLDCGPESSKK

SEQ ID NO: 603 - protein, 20 aa, Artificial Sequence
  Synthetic: Cathepsin B sensitive site
DCAFYDPTHAWSGGLDHQLK

SEQ ID NO: 604 - protein, 18 aa, Artificial Sequence
  Synthetic: Cathepsin B sensitive site
QFQALLQYADPVSAQHAK

SEQ ID NO: 605 - protein, 21 aa, Artificial Sequence
  Synthetic: Cathepsin B sensitive site
EQPQHPLHVTYAGAAVDELGK

SEQ ID NO: 606 - protein, 12 aa, Artificial Sequence
  Synthetic: Cathepsin B sensitive site
TFSYAGFEMQPK

SEQ ID NO: 607 - protein, 21 aa, Artificial Sequence
  Synthetic: Cathepsin B sensitive site
GYIWNYGAIPQTWEDPGHNDK

SEQ ID NO: 608 - protein, 23 aa, Artificial Sequence
  Synthetic: Cathepsin B sensitive site
DYTGYNNYYGYGDYSNQQSGYGK

SEQ ID NO: 609 - protein, 13 aa, Artificial Sequence
  Synthetic: Cathepsin B sensitive site
QSGYGGQTKPIFR

SEQ ID NO: 610 - protein, 20 aa, Artificial Sequence
  Synthetic: Cathepsin B sensitive site
VPLIESGTAGYLGQVTTIKK

SEQ ID NO: 611 - protein, 20 aa, Artificial Sequence
  Synthetic: Cathepsin B sensitive site
GILGYTEHQVVSSDFNSDTH

SEQ ID NO: 612 - protein, 22 aa, Artificial Sequence
  Synthetic: Cathepsin B sensitive site
GILGYTEHQVVSSDFNSDTHSS

SEQ ID NO: 613 - protein, 16 aa, Artificial Sequence
  Synthetic: Cathepsin B sensitive site
  misc_feature (5)..(5): Xaa can be any naturally occurring amino acid
QTCVXHYTGMLEDGKK

SEQ ID NO: 614 - protein, 19 aa, Artificial Sequence
  Synthetic: Cathepsin B sensitive site
  misc_feature (5)..(5): Xaa can be any naturally occurring amino acid
QTCVXHYTGMLEDGKKFDS

SEQ ID NO: 615 - protein, 9 aa, Artificial Sequence
  Synthetic: Cathepsin B sensitive site
  misc_feature (2)..(2): Xaa can be any naturally occurring amino acid
AXYVTHLMK

SEQ ID NO: 616 - protein, 5 aa, Artificial Sequence
  Synthetic: Cathepsin S sensitive site
KVSVR

SEQ ID NO: 617 - protein, 5 aa, Artificial Sequence
  Synthetic: Cathepsin S sensitive site
TVGLR

SEQ ID NO: 618 - protein, 5 aa, Artificial Sequence
  Synthetic: Cathepsin S sensitive site
PMGLP

SEQ ID NO: 619 - protein, 5 aa, Artificial Sequence
  Synthetic: Cathepsin S sensitive site
PMGAP

SEQ ID NO: 620 - protein, 19 aa, Artificial Sequence
  Synthetic: Cathepsin S sensitive site
MDLAAAAEPGAGSQHLEVR

SEQ ID NO: 621 - protein, 41 aa, Artificial Sequence; identical to SEQ ID NO: 226
  Synthetic: Cathepsin S sensitive site

SEQ ID NO: 622 - protein, 18 aa, Artificial Sequence
  Synthetic: Cathepsin S sensitive site
GTSFDAAATSGGSASSEK

SEQ ID NO: 623 - protein, 39 aa, Artificial Sequence; identical to SEQ ID NO: 227
  Synthetic: Cathepsin S sensitive site

SEQ ID NO: 624 - protein, 14 aa, Artificial Sequence
  Synthetic: Cathepsin S sensitive site
GILAADESTGSIAK

SEQ ID NO: 625 - protein, 29 aa, Artificial Sequence
  Synthetic: Cathepsin S sensitive site
PAAPALSAADTKPGTTGSGAGSGGPGGLT

SEQ ID NO: 626 - protein, 38 aa, Artificial Sequence; identical to SEQ ID NO: 229
  Synthetic: Cathepsin S sensitive site

SEQ ID NO: 627 - protein, 18 aa, Artificial Sequence
  Synthetic: Cathepsin S sensitive site
SSIQATTAAGSGHPTSCC

SEQ ID NO: 628 - protein, 18 aa, Artificial Sequence
  Synthetic: Cathepsin S sensitive site
NEAIQAAHDAVAQEGQCR

SEQ ID NO: 629 - protein, 22 aa, Artificial Sequence
  Synthetic: Cathepsin S sensitive site
QFGLPAEAVEAANKGDVEAFAK

SEQ ID NO: 630 - protein, 21 aa, Artificial Sequence
  Synthetic: Cathepsin S sensitive site
LVIPNTLAVNAAQDSTDLVAK

SEQ ID NO: 631 - protein, 16 aa, Artificial Sequence
  Synthetic: Cathepsin S sensitive site
EALAAMNAAQVKPLGK

SEQ ID NO: 632 - protein, 21 aa, Artificial Sequence
  Synthetic: Cathepsin S sensitive site
APRPPVSAASGRPQDDTDSSR

SEQ ID NO: 633 - protein, 25 aa, Artificial Sequence
  Synthetic: Cathepsin S sensitive site
GDPQEAKPQEAAVAPEKPPASDETK

SEQ ID NO: 634 - protein, 16 aa, Artificial Sequence
  Synthetic: Cathepsin S sensitive site
EGDMIVCAAYAHELPK

SEQ ID NO: 635 - protein, 14 aa, Artificial Sequence
  Synthetic: Cathepsin S sensitive site
GILAADESTGSIAK

SEQ ID NO: 636 - protein, 19 aa, Artificial Sequence
  Synthetic: Cathepsin S sensitive site
PEEACSFILSADFPALVVK

SEQ ID NO: 637 - protein, 24 aa, Artificial Sequence
  Synthetic: Cathepsin S sensitive site
GWNAYIDNLMADGTCQDAAIVGYK

SEQ ID NO: 638 - protein, 14 aa, Artificial Sequence
  Synthetic: Cathepsin S sensitive site
YLAADKDGNVTCER

SEQ ID NO: 639 - protein, 16 aa, Artificial Sequence
  Synthetic: Cathepsin S sensitive site
LPVDFVTADKFDENAK

SEQ ID NO: 640 - protein, 13 aa, Artificial Sequence
  Synthetic: Cathepsin S sensitive site
  misc_feature (2)..(2): Xaa can be any naturally occurring amino acid
TXEAEAAHGTVTR

SEQ ID NO: 641 - protein, 12 aa, Artificial Sequence
  Synthetic: Cathepsin S sensitive site
TVFAEHISDECK

SEQ ID NO: 642 - protein, 13 aa, Artificial Sequence
  Synthetic: Cathepsin S sensitive site
TVFAEHISDECKR

SEQ ID NO: 643 - protein, 16 aa, Artificial Sequence
  Synthetic: Cathepsin S sensitive site
DLEAEHVEVEDTTLNR

SEQ ID NO: 644 - protein, 11 aa, Artificial Sequence
  Synthetic: Cathepsin S sensitive site
CAEIAHNVSSK

SEQ ID NO: 645 - protein, 28 aa, Artificial Sequence
  Synthetic: Cathepsin S sensitive site
EAAAAGGGVGAGAGGGCGPGGADSSKPR

SEQ ID NO: 646 - protein, 15 aa, Artificial Sequence
  Synthetic: Cathepsin S sensitive site
  misc_feature (2)..(2): Xaa can be any naturally occurring amino acid
YXLVGAGAIGCELLK

SEQ ID NO: 647 - protein, 15 aa, Artificial Sequence
  Synthetic: Cathepsin S sensitive site
LIYAGKILNDDTALK

SEQ ID NO: 648 - protein, 20 aa, Artificial Sequence
  Synthetic: Cathepsin S sensitive site
FGDNTAGCTSAGPHFNPLSR

SEQ ID NO: 649 - protein, 13 aa, Artificial Sequence
  Synthetic: Cathepsin S sensitive site
IITLAGPTNAIFK

SEQ ID NO: 650 - protein, 17 aa, Artificial Sequence
  Synthetic: Cathepsin S sensitive site
  misc_feature (5)..(5): Xaa can be any naturally occurring amino acid
EIVHXQAGQCGNQIGAK

SEQ ID NO: 651 - protein, 19 aa, Artificial Sequence
  Synthetic: Cathepsin S sensitive site
AICAGPTALLAHEIGFGSK

SEQ ID NO: 652 - protein, 18 aa, Artificial Sequence
  Synthetic: Cathepsin S sensitive site
SHEHSPSDLEAHFVPLVK

SEQ ID NO: 653 - protein, 12 aa, Artificial Sequence
  Synthetic: Cathepsin S sensitive site
ELQAHGADELLK

SEQ ID NO: 654 - protein, 18 aa, Artificial Sequence
  Synthetic: Cathepsin S sensitive site
SWADLVNAHVVPGSGVVK

SEQ ID NO: 655 - protein, 12 aa, Artificial Sequence
  Synthetic: Cathepsin S sensitive site
TFIAIKPDGVQR

SEQ ID NO: 656 - protein, 21 aa, Artificial Sequence
  Synthetic: Cathepsin S sensitive site
GYIWNYGAIPQTWEDPGHNDK

SEQ ID NO: 657 - protein, 15 aa, Artificial Sequence
  Synthetic: Cathepsin S sensitive site
  misc_feature (5)..(6): Xaa can be any naturally occurring amino acid
ATATXXAKPQITNPK

SEQ ID NO: 658 - protein, 19 aa, Artificial Sequence
  Synthetic: Cathepsin S sensitive site
TTETAQHAQGAKPQVQPQK

SEQ ID NO: 659 - protein, 18 aa, Artificial Sequence
  Synthetic: Cathepsin S sensitive site
VASYLLAALGGNSSPSAK

SEQ ID NO: 660 - protein, 14 aa, Artificial Sequence
  Synthetic: Cathepsin S sensitive site
IALPAPRGSGTASD

SEQ ID NO: 661 - protein, 14 aa, Artificial Sequence
  Synthetic: Cathepsin S sensitive site
QIGNVAALPGIVHR

SEQ ID NO: 662 - protein, 21 aa, Artificial Sequence
  Synthetic: Cathepsin S sensitive site
DGTVLCELINALYPEGQAPVK

SEQ ID NO: 663 - protein, 22 aa, Artificial Sequence
  Synthetic: Cathepsin S sensitive site
DGTVLCELINALYPEGQAPVKK

SEQ ID NO: 664 - protein, 14 aa, Artificial Sequence
  Synthetic: Cathepsin S sensitive site
DFTVSAMHGDMDQK

SEQ ID NO: 665 - protein, 16 aa, Artificial Sequence
  Synthetic: Cathepsin S sensitive site
LVTDCVAAMNPDAVLR

SEQ ID NO: 666 - protein, 14 aa, Artificial Sequence
  Synthetic: Cathepsin S sensitive site
HELQANCYEEVKDR

SEQ ID NO: 667 - protein, 25 aa, Artificial Sequence
  Synthetic: Cathepsin S sensitive site
CSLQAAAILDANDAHQTETSSSQVK

SEQ ID NO: 668 - protein, 20 aa, Artificial Sequence
  Synthetic: Cathepsin S sensitive site
SGLGRPQLQGAPAAEPMAVP

SEQ ID NO: 669 - protein, 18 aa, Artificial Sequence
  Synthetic: Cathepsin S sensitive site
QETAVAPSLVAPALNKPK

SEQ ID NO: 670 - protein, 15 aa, Artificial Sequence
  Synthetic: Cathepsin S sensitive site
  misc_feature (3)..(3): Xaa can be any naturally occurring amino acid
AQXAAPASVPAQAPK

SEQ ID NO: 671 - protein, 21 aa, Artificial Sequence
  Synthetic: Cathepsin S sensitive site
GETIFVTAPHEATAGIIGVNR

SEQ ID NO: 672 - protein, 18 aa, Artificial Sequence
  Synthetic: Cathepsin S sensitive site
EYSSELNAPSQESDSHPR

SEQ ID NO: 673 - protein, 20 aa, Artificial Sequence
  Synthetic: Cathepsin S sensitive site
DQVTAQEIFQDNHEDGPTAK

SEQ ID NO: 674 - protein, 19 aa, Artificial Sequence
  Synthetic: Cathepsin S sensitive site
LHEEEIQELQAQIQEQHVQ

SEQ ID NO: 675 - protein, 18 aa, Artificial Sequence
  Synthetic: Cathepsin S sensitive site
QQQRPLEAQPSAPGHSVK

SEQ ID NO: 676 - protein, 22 aa, Artificial Sequence
  Synthetic: Cathepsin S sensitive site
AAHTANFLLNASGSTSTPAPSR

SEQ ID NO: 677 - protein, 16 aa, Artificial Sequence
  Synthetic: Cathepsin S sensitive site
  misc_feature (2)..(4): Xaa can be any naturally occurring amino acid
IXXXFLGASLKDEVLK

SEQ ID NO: 678 - protein, 24 aa, Artificial Sequence
  Synthetic: Cathepsin S sensitive site
NVEEADAAMAASPHAVDGNTVELK

SEQ ID NO: 679 - protein, 16 aa, Artificial Sequence
  Synthetic: Cathepsin S sensitive site
ALLVTASQCQQPAENK

SEQ ID NO: 680 - protein, 31 aa, Artificial Sequence
  Synthetic: Cathepsin S sensitive site
QSSWGMMGMLASQQNQSGPSGNNQNQGNMQR

SEQ ID NO: 681 - protein, 16 aa, Artificial Sequence
  Synthetic: Cathepsin S sensitive site
LPPGFSASSTVEKPSK

SEQ ID NO: 682 - protein, 16 aa, Artificial Sequence
  Synthetic: Cathepsin S sensitive site
AAVPSGASTGIYEALE

SEQ ID NO: 683 - protein, 16 aa, Artificial Sequence
  Synthetic: Cathepsin S sensitive site
LNCQVIGASVDSHFCH

SEQ ID NO: 684 - protein, 20 aa, Artificial Sequence
  Synthetic: Cathepsin S sensitive site
GANQYTFHLEATENPGALIK

SEQ ID NO: 685 - protein, 22 aa, Artificial Sequence
  Synthetic: Cathepsin S sensitive site
LSELTQQLAQATGKPPQYIAVH

SEQ ID NO: 686 - protein, 45 aa, Artificial Sequence
  Synthetic: Cathepsin S sensitive site
AGEQEGAMVAATQGAAAAAGSGAGTGGGTASGGTEGGSAESEGAK

SEQ ID NO: 687 - protein, 19 aa, Artificial Sequence
  Synthetic: Cathepsin S sensitive site
ISSIQATTAAGSGHPTSCC

SEQ ID NO: 688 - protein, 13 aa, Artificial Sequence
  Synthetic: Cathepsin S sensitive site
GLGATTHPTAAVK

SEQ ID NO: 689 - protein, 17 aa, Artificial Sequence
  Synthetic: Cathepsin S sensitive site
IEPPPLDAVIEAEHTLR

SEQ ID NO: 690 - protein, 19 aa, Artificial Sequence
  Synthetic: Cathepsin S sensitive site
  misc_feature (2)..(2): Xaa can be any naturally occurring amino acid
SXGLPVGAVINCADNTGAK

SEQ ID NO: 691 - protein, 18 aa, Artificial Sequence
  Synthetic: Cathepsin S sensitive site
VNVANVGAVPSGQDNIHR

SEQ ID NO: 692 - protein, 13 aa, Artificial Sequence
  Synthetic: Cathepsin S sensitive site
QFLECAQNQGDIK

SEQ ID NO: 693 - protein, 20 aa, Artificial Sequence
  Synthetic: Cathepsin S sensitive site
GGLTDEAALSCCSDADPSTK

SEQ ID NO: 694 - protein, 11 aa, Artificial Sequence
  Synthetic: Cathepsin S sensitive site
ILSCGEVIHVK

SEQ ID NO: 695 - protein, 14 aa, Artificial Sequence
  Synthetic: Cathepsin S sensitive site
AIVDCGFEHPSEVQ

SEQ ID NO: 696 - protein, 14 aa, Artificial Sequence
  Synthetic: Cathepsin S sensitive site
HYYEVSCHDQGLCR

SEQ ID NO: 697 - protein, 15 aa, Artificial Sequence
  Synthetic: Cathepsin S sensitive site
MLVQCMQDQEHPSIR

SEQ ID NO: 698 - protein, 15 aa, Artificial Sequence
  Synthetic: Cathepsin S sensitive site
DVVICPDASLEDAKK

SEQ ID NO: 699 - protein, 16 aa, Artificial Sequence
  Synthetic: Cathepsin S sensitive site
SGYAFVDCPDEHWAMK

SEQ ID NO: 700 - protein, 19 aa, Artificial Sequence
  Synthetic: Cathepsin S sensitive site
FVLCPECENPETDLHVNPK

SEQ ID NO: 701 - protein, 14 aa, Artificial Sequence
  Synthetic: Cathepsin S sensitive site
IAILTCPFEPPKPK

SEQ ID NO: 702 - protein, 14 aa, Artificial Sequence
  Synthetic: Cathepsin S sensitive site
IAILTCPFEPPKPK

SEQ ID NO: 703 - protein, 25 aa, Artificial Sequence
  Synthetic: Cathepsin S sensitive site
AATEQYHQVLCPGPSQDDPLHPLNK

SEQ ID NO: 704 - protein, 14 aa, Artificial Sequence
  Synthetic: Cathepsin S sensitive site
AIVICPTDEDLKDR

SEQ ID NO: 705 - protein, 19 aa, Artificial Sequence
  Synthetic: Cathepsin S sensitive site
ATAHAQAQLGCPVIIHPGR

SEQ ID NO: 706 - protein, 14 aa, Artificial Sequence
  Synthetic: Cathepsin S sensitive site
  misc_feature (5)..(5): Xaa can be any naturally occurring amino acid
IIPGXMCQGGDFTR

SEQ ID NO: 707 - protein, 14 aa, Artificial Sequence
  Synthetic: Cathepsin S sensitive site
  misc_feature (5)..(5): Xaa can be any naturally occurring amino acid
IIPGXMCQGGDFTR

SEQ ID NO: 708 - protein, 19 aa, Artificial Sequence
  Synthetic: Cathepsin S sensitive site
PALYWLSGLTCTEQNFISK

SEQ ID NO: 709 - protein, 17 aa, Artificial Sequence
  Synthetic: Cathepsin S sensitive site
MTVGCVAGDEESYEVFK

SEQ ID NO: 710 - protein, 17 aa, Artificial Sequence
  Synthetic: Cathepsin S sensitive site
ATVAFCDAQSTQEIHEK

SEQ ID NO: 711 - protein, 16 aa, Artificial Sequence
  Synthetic: Cathepsin S sensitive site
NYGILADATEQVGQHK

SEQ ID NO: 712 - protein, 10 aa, Artificial Sequence
  Synthetic: Cathepsin S sensitive site
LQDCEGLIVR

SEQ ID NO: 713 - protein, 20 aa, Artificial Sequence
  Synthetic: Cathepsin S sensitive site
  misc_feature (7)..(7): Xaa can be any naturally occurring amino acid
  misc_feature (10)..(10): Xaa can be any naturally occurring amino acid
QISAGYXPVXDCHTAHIACK

SEQ ID NO: 714 - protein, 20 aa, Artificial Sequence
  Synthetic: Cathepsin S sensitive site
  misc_feature (7)..(7): Xaa can be any naturally occurring amino acid
  misc_feature (10)..(10): Xaa can be any naturally occurring amino acid
QISAGYXPVXDCHTAHIACK

SEQ ID NO: 715 - protein, 19 aa, Artificial Sequence
  Synthetic: Cathepsin S sensitive site
TGEPCCDWVGDEGAGHFVK

SEQ ID NO: 716 - protein, 19 aa, Artificial Sequence
  Synthetic: Cathepsin S sensitive site
DATNVGDEGGFAPNILENK

SEQ ID NO: 717 - protein, 13 aa, Artificial Sequence
  Synthetic: Cathepsin S sensitive site
NILDFPQHVSPSK

SEQ ID NO: 718 - protein, 14 aa, Artificial Sequence
  Synthetic: Cathepsin S sensitive site
DHVVSDFSEHGSLK

SEQ ID NO: 719 - protein, 18 aa, Artificial Sequence
  Synthetic: Cathepsin S sensitive site
ADNELSPECLDGAQHFLK

SEQ ID NO: 720 - protein, 18 aa, Artificial Sequence
  Synthetic: Cathepsin S sensitive site
IQTLGYFPVGDGDFPHQK

SEQ ID NO: 721 - protein, 19 aa, Artificial Sequence
  Synthetic: Cathepsin S sensitive site
  misc_feature (2)..(2): Xaa can be any naturally occurring amino acid
  misc_feature (5)..(7): Xaa can be any naturally occurring amino acid
DXQEXXXFLLDGLHEDLNR

SEQ ID NO: 722 - protein, 18 aa, Artificial Sequence
  Synthetic: Cathepsin S sensitive site
MILIQDGSQNTNVDKPLR

SEQ ID NO: 723 - protein, 15 aa, Artificial Sequence
  Synthetic: Cathepsin S sensitive site
FTISDHPQPIDPLLK

SEQ ID NO: 724 - protein, 18 aa, Artificial Sequence
  Synthetic: Cathepsin S sensitive site
  misc_feature (5)..(5): Xaa can be any naturally occurring amino acid
VNPTXFFDIAVDGEPLGR

SEQ ID NO: 725 - protein, 17 aa, Artificial Sequence
  Synthetic: Cathepsin S sensitive site
YEDICPSTHNMDVPNIK

SEQ ID NO: 726 - protein, 20 aa, Artificial Sequence
  Synthetic: Cathepsin S sensitive site
NGSIYNPEVLDITEETLHSR

SEQ ID NO: 727 - protein, 13 aa, Artificial Sequence
  Synthetic: Cathepsin S sensitive site
QHIVNDMNPGNLH

SEQ ID NO: 728 - protein, 13 aa, Artificial Sequence
  Synthetic: Cathepsin S sensitive site
MLLDSEQHPCQLK

SEQ ID NO: 729 - protein, 13 aa, Artificial Sequence
  Synthetic: Cathepsin S sensitive site
EGLMLDSHEELYK

SEQ ID NO: 730 - protein, 15 aa, Artificial Sequence
  Synthetic: Cathepsin S sensitive site
TAGDTHLGGEDFDNR

SEQ ID NO: 731 - protein, 21 aa, Artificial Sequence
  Synthetic: Cathepsin S sensitive site
PGGLLLGDVAPNFEANTTVGR

SEQ ID NO: 732 - protein, 18 aa, Artificial Sequence
  Synthetic: Cathepsin S sensitive site
NDGATILSMMDVDHQIAK

SEQ ID NO: 733 - protein, 19 aa, Artificial Sequence
  Synthetic: Cathepsin S sensitive site
GEEGLTLNLEDVQPHDLGK

SEQ ID NO: 734 - protein, 18 aa, Artificial Sequence
  Synthetic: Cathepsin S sensitive site
TIDNSQGAYQEAFDISKK

SEQ ID NO: 735 - protein, 18 aa, Artificial Sequence
  Synthetic: Cathepsin S sensitive site
IVGFFDDSFSEAHSEFLK

SEQ ID NO: 736 - protein, 21 aa, Artificial Sequence
  Synthetic: Cathepsin S sensitive site
QEEASGVALGEAPDHSYESLR

SEQ ID NO: 737 - protein, 14 aa, Artificial Sequence
  Synthetic: Cathepsin S sensitive site
DPVQEAWAEDVDLR

SEQ ID NO: 738 - protein, 16 aa, Artificial Sequence
  Synthetic: Cathepsin S sensitive site
PMIYICGECHTENEIK

SEQ ID NO: 739 - protein, 15 aa, Artificial Sequence
  Synthetic: Cathepsin S sensitive site
HMSEFMECNLNELVK

SEQ ID NO: 740 - protein, 15 aa, Artificial Sequence
  Synthetic: Cathepsin S sensitive site
MGYAEEAPYDAIHVG

SEQ ID NO: 741 - protein, 14 aa, Artificial Sequence
  Synthetic: Cathepsin S sensitive site
MADQLTEEQIAEFK

SEQ ID NO: 742 - protein, 12 aa, Artificial Sequence
  Synthetic: Cathepsin S sensitive site
YLAEFATGNDRK

SEQ ID NO: 743 - protein, 17 aa, Artificial Sequence
  Synthetic: Cathepsin S sensitive site
LAELEEFINGPNNAHIQ

SEQ ID NO: 744 - protein, 9 aa, Artificial Sequence
  Synthetic: Cathepsin S sensitive site
  misc_feature (1)..(1): Xaa can be any naturally occurring amino acid
XEFTDHLVK

SEQ ID NO: 745 - protein, 23 aa, Artificial Sequence
  Synthetic: Cathepsin S sensitive site
FCVGFLEGGKDSCQGDSGGPVVC

SEQ ID NO: 746 - protein, 15 aa, Artificial Sequence
  Synthetic: Cathepsin S sensitive site
LLAEGHPDPDAELQR

SEQ ID NO: 747 - protein, 10 aa, Artificial Sequence
  Synthetic: Cathepsin S sensitive site
GLTEGLHGFH

SEQ ID NO: 748 - protein, 19 aa, Artificial Sequence
  Synthetic: Cathepsin S sensitive site
FVHWYVGEGMEEGEFSEAR

SEQ ID NO: 749 - protein, 13 aa, Artificial Sequence
  Synthetic: Cathepsin S sensitive site
MLLHEGQHPAQLR

SEQ ID NO: 750 - protein, 18 aa, Artificial Sequence
  Synthetic: Cathepsin S sensitive site
YHGYTFANLGEHEFVEEK

SEQ ID NO: 751 - protein, 12 aa, Artificial Sequence
  Synthetic: Cathepsin S sensitive site
TVFAEHISDECK

SEQ ID NO: 752 - protein, 15 aa, Artificial Sequence
  Synthetic: Cathepsin S sensitive site
VILEEHSTCENEVSK

SEQ ID NO: 753 - protein, 15 aa, Artificial Sequence
  Synthetic: Cathepsin S sensitive site
LLTEIHGGAGGPSGR

SEQ ID NO: 754 - protein, 16 aa, Artificial Sequence
  Synthetic: Cathepsin S sensitive site
AHLMEIQVNGGTVAEK

SEQ ID NO: 755 - protein, 18 aa, Artificial Sequence
  Synthetic: Cathepsin S sensitive site
ISWLDANTLAEKDEFEHK

SEQ ID NO: 756 - protein, 12 aa, Artificial Sequence
  Synthetic: Cathepsin S sensitive site
  misc_feature (1)..(1): Xaa can be any naturally occurring amino acid
XEKFEDENFILK

SEQ ID NO: 757 - protein, 22 aa, Artificial Sequence
  Synthetic: Cathepsin S sensitive site
SAVEAGSEVSEKPGQEAPVLPK

SEQ ID NO: 758 - protein, 13 aa, Artificial Sequence
  Synthetic: Cathepsin S sensitive site
ILNEKPTTDEPEK

SEQ ID NO: 759 - protein, 14 aa, Artificial Sequence
  Synthetic: Cathepsin S sensitive site
YLAEKYEWDVAEAR

SEQ ID NO: 760 - protein, 15 aa, Artificial Sequence
  Synthetic: Cathepsin S sensitive site
  misc_feature (6)..(6): Xaa can be any naturally occurring amino acid
CLELFXELAEDKENY

SEQ ID NO: 761 - protein, 16 aa, Artificial Sequence
  Synthetic: Cathepsin S sensitive site
  misc_feature (6)..(6): Xaa can be any naturally occurring amino acid
CLELFXELAEDKENYK

SEQ ID NO: 762 - protein, 11 aa, Artificial Sequence
  Synthetic: Cathepsin S sensitive site
MEELHNQEVQK

SEQ ID NO: 763 - protein, 26 aa, Artificial Sequence
  Synthetic: Cathepsin S sensitive site
GVNVAGVSLQELNPEMGTDNDSENWK

SEQ ID NO: 764 - protein, 16 aa, Artificial Sequence
  Synthetic: Cathepsin S sensitive site
ASDIAMTELPPTHPIR

SEQ ID NO: 765 - protein, 16 aa, Artificial Sequence
  Synthetic: Cathepsin S sensitive site
VVVAENFDEIVNNENK

SEQ ID NO: 766 - protein, 16 aa, Artificial Sequence
  Synthetic: Cathepsin S sensitive site
  misc_feature (2)..(2): Xaa can be any naturally occurring amino acid
IXEGCEEPATHNALAK

SEQ ID NO: 767 - protein, 13 aa, Artificial Sequence
  Synthetic: Cathepsin S sensitive site
VTEQGAELSNEER

SEQ ID NO: 768 - protein, 14 aa, Artificial Sequence
  Synthetic: Cathepsin S sensitive site
AVTEQGHELSNEER

SEQ ID NO: 769 - protein, 21 aa, Artificial Sequence
  Synthetic: Cathepsin S sensitive site
QVDQEEPHVEEQQQQTPAENK

SEQ ID NO: 770 - protein, 14 aa, Artificial Sequence
  Synthetic: Cathepsin S sensitive site
VVFEQTKVIADNVK

SEQ ID NO: 771 - protein, 23 aa, Artificial Sequence
  Synthetic: Cathepsin S sensitive site
NIFVGENILEESENLHNADQPLR

SEQ ID NO: 772 - protein, 14 aa, Artificial Sequence
  Synthetic: Cathepsin S sensitive site
LFIHESIHDEVVNR

SEQ ID NO: 773 - protein, 25 aa, Artificial Sequence
  Synthetic: Cathepsin S sensitive site
VTNGIEEPLEESSHEPEPEPESETK

SEQ ID NO: 774 - protein, 12 aa, Artificial Sequence
  Synthetic: Cathepsin S sensitive site
GIVEESVTGVHR

SEQ ID NO: 775 - protein, 18 aa, Artificial Sequence
  Synthetic: Cathepsin S sensitive site
QCPSVVSLLSESYNPHVR

SEQ ID NO: 776 - protein, 14 aa, Artificial Sequence
  Synthetic: Cathepsin S sensitive site
ASLQETHFDSTQTK

SEQ ID NO: 777 - protein, 10 aa, Artificial Sequence
  Synthetic: Cathepsin S sensitive site
TFGETHPFTK

SEQ ID NO: 778 - protein, 17 aa, Artificial Sequence
  Synthetic: Cathepsin S sensitive site
VMLGETNPADSKPGTIR

SEQ ID NO: 779 - protein, 18 aa, Artificial Sequence
  Synthetic: Cathepsin S sensitive site
GADFLVTEVENGGSLGSK

SEQ ID NO: 780 - protein, 21 aa, Artificial Sequence
  Synthetic: Cathepsin S sensitive site
LPTEAYISVEEVHDDGTPTSK

SEQ ID NO: 781 - protein, 18 aa, Artificial Sequence
  Synthetic: Cathepsin S sensitive site
MEEVPHDCPGADSAQAGR

SEQ ID NO: 782 - protein, 15 aa, Artificial Sequence
  Synthetic: Cathepsin S sensitive site
VDENCVGFDHTVKPV

SEQ ID NO: 783 - protein, 21 aa, Artificial Sequence
  Synthetic: Cathepsin S sensitive site
VHVVPDQLMAFGGSSEPCALC

SEQ ID NO: 784 - protein, 15 aa, Artificial Sequence
  Synthetic: Cathepsin S sensitive site
IWCFGPDGTGPNILT

SEQ ID NO: 785 - protein, 10 aa, Artificial Sequence
  Synthetic: Cathepsin S sensitive site
  misc_feature (3)..(3): Xaa can be any naturally occurring amino acid
YVXFGPHAGK

SEQ ID NO: 786 - protein, 18 aa, Artificial Sequence
  Synthetic: Cathepsin S sensitive site
EFAGFQCQIQFGPHNEQK

SEQ ID NO: 787 - protein, 17 aa, Artificial Sequence
  Synthetic: Cathepsin S sensitive site
  misc_feature (3)..(3): Xaa can be any naturally occurring amino acid
KPXKPMQFLGDEETVRK

SEQ ID NO: 788 - protein, 13 aa, Artificial Sequence
  Synthetic: Cathepsin S sensitive site
MVYMFQYDSTHGK

SEQ ID NO: 789 - protein, 15 aa, Artificial Sequence
  Synthetic: Cathepsin S sensitive site
EELGFRPEYSASQLK

SEQ ID NO: 790 - protein, 10 aa, Artificial Sequence
  Synthetic: Cathepsin S sensitive site
HLEFSHDQYR

SEQ ID NO: 791 - protein, 15 aa, Artificial Sequence
  Synthetic: Cathepsin S sensitive site
TCGFDFTGAVEDISK

SEQ ID NO: 792 - protein, 14 aa, Artificial Sequence
  Synthetic: Cathepsin S sensitive site
GFGFVDFNSEEDAK

SEQ ID NO: 793 - protein, 10 aa, Artificial Sequence
  Synthetic: Cathepsin S sensitive site
NYGFVHIEDK

SEQ ID NO: 794 - protein, 15 aa, Artificial Sequence
  Synthetic: Cathepsin S sensitive site
GFGFVTFDDHDPVDK

SEQ ID NO: 795 - protein, 17 aa, Artificial Sequence
  Synthetic: Cathepsin S sensitive site
LPNFGFVVFDDSEPVQK

SEQ ID NO: 796 - protein, 15 aa, Artificial Sequence
  Synthetic: Cathepsin S sensitive site
QLLCGAAIGTHEDDK

SEQ ID NO: 797 - protein, 17 aa, Artificial Sequence
  Synthetic: Cathepsin S sensitive site
QLLCGAAIGTHEDDKYR

SEQ ID NO: 798 - protein, 16 aa, Artificial Sequence
  Synthetic: Cathepsin S sensitive site
MTNGFSGADLTEICQR

SEQ ID NO: 799 - protein, 22 aa, Artificial Sequence
  Synthetic: Cathepsin S sensitive site
VQGEVMEGADNQGAGEQGRPVR

SEQ ID NO: 800 - protein, 21 aa, Artificial Sequence
  Synthetic: Cathepsin S sensitive site
MGGHGYGGAGDASSGFHGGHF

SEQ ID NO: 801 - protein, 36 aa, Artificial Sequence
  Synthetic: Cathepsin S sensitive site
LGNVLGGLISGAGGGGGGGGGGGGGGGGGGGGTAMR

SEQ ID NO: 802 - protein, 21 aa, Artificial Sequence
  Synthetic: Cathepsin S sensitive site
FGGSFAGSFGGAGGHAPGVAR

SEQ ID NO: 803 - protein, 15 aa, Artificial Sequence
  Synthetic: Cathepsin S sensitive site
VLVVGAGGIGCELLK

SEQ ID NO: 804 - protein, 20 aa, Artificial Sequence
  Synthetic: Cathepsin S sensitive site
VTADHGPAVSGAHNTIICAR

SEQ ID NO: 805 - protein, 14 aa, Artificial Sequence
  Synthetic: Cathepsin S sensitive site
CEALAGAPLDNAPK

SEQ ID NO: 806 - protein, 14 aa, Artificial Sequence
  Synthetic: Cathepsin S sensitive site
STGGAPTFNVTVTK

SEQ ID NO: 807 - protein, 14 aa, Artificial Sequence
  Synthetic: Cathepsin S sensitive site
KGCDVVVIPAGVPR

SEQ ID NO: 808 - protein, 15 aa, Artificial Sequence
  Synthetic: Cathepsin S sensitive site
FSPAGVEGCPALPHK

SEQ ID NO: 809 - protein, 13 aa, Artificial Sequence
  Synthetic: Cathepsin S sensitive site
HSSLAGCQIINYR

SEQ ID NO: 810 - protein, 19 aa, Artificial Sequence
  Synthetic: Cathepsin S sensitive site
SSEVGYDAMAGDFVNMVEK

SEQ ID NO: 811 - protein, 18 aa, Artificial Sequence
  Synthetic: Cathepsin S sensitive site
SIEDSVISLSGDHCIIGR

SEQ ID NO: 812 - protein, 15 aa, Artificial Sequence
  Synthetic: Cathepsin S sensitive site
VTGDHIPTPQDLPQR

SEQ ID NO: 813 - protein, 17 aa, Artificial Sequence
  Synthetic: Cathepsin S sensitive site
NGDTFLGGEDFDQALLR

SEQ ID NO: 814 - protein, 16 aa, Artificial Sequence
  Synthetic: Cathepsin S sensitive site
IVYICCGEDHTAALTK

SEQ ID NO: 815 - protein, 17 aa, Artificial Sequence
  Synthetic: Cathepsin S sensitive site
MVDGNVSGEFTDLVPEK

SEQ ID NO: 816 - protein, 12 aa, Artificial Sequence
  Synthetic: Cathepsin S sensitive site
MAAQGEPQVQFK

SEQ ID NO: 817 - protein, 20 aa, Artificial Sequence
  Synthetic: Cathepsin S sensitive site
QALAVHLALQGESSSEHFLK

SEQ ID NO: 818 - protein, 16 aa, Artificial Sequence
  Synthetic: Cathepsin S sensitive site
AFYNNVLGEYEEYITK

SEQ ID NO: 819 - protein, 13 aa, Artificial Sequence
  Synthetic: Cathepsin S sensitive site
LLNQMDGFDTLHR

SEQ ID NO: 820 - protein, 15 aa, Artificial Sequence
  Synthetic: Cathepsin S sensitive site
GLTEGLHGFHVHEFG

SEQ ID NO: 821 - protein, 22 aa, Artificial Sequence
  Synthetic: Cathepsin S sensitive site
GLTEGLHGFHVHEFGDNTAGCT

SEQ ID NO: 822 - protein, 24 aa, Artificial Sequence
  Synthetic: Cathepsin S sensitive site
AADSYFSLLQGFINSLDESTQESK

SEQ ID NO: 823 - protein, 21 aa, Artificial Sequence
  Synthetic: Cathepsin S sensitive site
INPYLLGTMAGGAADCSFWER

SEQ ID NO: 824 - protein, 20 aa, Artificial Sequence
  Synthetic: Cathepsin S sensitive site
QHDLFDSGFGGGAGVETGGK

SEQ ID NO: 825 - protein, 19 aa, Artificial Sequence
  Synthetic: Cathepsin S sensitive site
TTHFVEGGDAGNREDQINR

SEQ ID NO: 826 - protein, 21 aa, Artificial Sequence
  Synthetic: Cathepsin S sensitive site
SQPIAQQPLQGGDHSGNYGYK

SEQ ID NO: 827 - protein, 22 aa, Artificial Sequence
  Synthetic: Cathepsin S sensitive site
GTDGTDNPLSGGDQYQNITVHR

SEQ ID NO: 828 - protein, 17 aa, Artificial Sequence
  Synthetic: Cathepsin S sensitive site
  misc_feature (5)..(5): Xaa can be any naturally occurring amino acid
GCITXIGGGDTATCCAK

SEQ ID NO: 829 - protein, 38 aa, Artificial Sequence
  Synthetic: Cathepsin S sensitive site
WGSGGGGGGGGGGGGGGGGGGGGGGGGGGGRKSSSAAA

SEQ ID NO: 830 - protein, 21 aa, Artificial Sequence
  Synthetic: Cathepsin S sensitive site
LAAGSLAAPGGGGGSAGGARP

SEQ ID NO: 831 - protein, 16 aa, Artificial Sequence
  Synthetic: Cathepsin S sensitive site
  misc_feature (3)..(5): Xaa can be any naturally occurring amino acid
GSXXXGGGSYNDFGNY

SEQ ID NO: 832 - protein, 20 aa, Artificial Sequence
  Synthetic: Cathepsin S sensitive site
  misc_feature (6)..(6): Xaa can be any naturally occurring amino acid
VNAANXSLLGGGGVDGCIHR

SEQ ID NO: 833 - protein, 23 aa, Artificial Sequence
  Synthetic: Cathepsin S sensitive site
FCVGFLEGGKDSCQGDSGGPVVC

SEQ ID NO: 834 - protein, 24 aa, Artificial Sequence
  Synthetic: Cathepsin S sensitive site
LVDGQIFCLHGGLSPSIDTLDHIR

SEQ ID NO: 835 - protein, 13 aa, Artificial Sequence
  Synthetic: Cathepsin S sensitive site
  misc_feature (3)..(3): Xaa can be any naturally occurring amino acid
MFXGGLSWDTSKK

SEQ ID NO: 836 - protein, 21 aa, Artificial Sequence
  Synthetic: Cathepsin S sensitive site
DPQELLEGGNQGEGDPQAEGR

SEQ ID NO: 837 - protein, 25 aa, Artificial Sequence
  Synthetic: Cathepsin S sensitive site
NMGGPYGGGNYGPGGSGGSGGYGGR

SEQ ID NO: 838 - protein, 16 aa, Artificial Sequence
  Synthetic: Cathepsin S sensitive site
RGGPGGPGGPGGPMGR

SEQ ID NO: 839 - protein, 19 aa, Artificial Sequence
  Synthetic: Cathepsin S sensitive site
SVLDDWFPLQGGQGQVHLR

SEQ ID NO: 840 - protein, 16 aa, Artificial Sequence
  Synthetic: Cathepsin S sensitive site
IIMEYLGGGSALDLLR

SEQ ID NO: 841 - protein, 23 aa, Artificial Sequence
  Synthetic: Cathepsin S sensitive site
SHFAMMHGGTGFAGIDSSSPEVK

SEQ ID NO: 842 - protein, 22 aa, Artificial Sequence
  Synthetic: Cathepsin S sensitive site
QGFQLTHSLGGGTGSGMGTLLI

SEQ ID NO: 843 - protein, 19 aa, Artificial Sequence
  Synthetic: Cathepsin S sensitive site
MADYLISGGTSYVPDDGLT

SEQ ID NO: 844 - protein, 13 aa, Artificial Sequence
  Synthetic: Cathepsin S sensitive site
VTVAGGVHISGLH

SEQ ID NO: 845 - protein, 14 aa, Artificial Sequence
  Synthetic: Cathepsin S sensitive site
VTVAGGVHISGLHT

SEQ ID NO: 846 - protein, 15 aa, Artificial Sequence
  Synthetic: Cathepsin S sensitive site
VTVAGGVHISGLHTE

SEQ ID NO: 847 - protein, 20 aa, Artificial Sequence
  Synthetic: Cathepsin S sensitive site
YAVSELAGHQTSAESWGTGR

SEQ ID NO: 848 - protein, 13 aa, Artificial Sequence
  Synthetic: Cathepsin S sensitive site
TFQGHTNEVNAIK

SEQ ID NO: 849 - protein, 14 aa, Artificial Sequence
  Synthetic: Cathepsin S sensitive site
GDGPVQGIINFEQK

SEQ ID NO: 850 - protein, 18 aa, Artificial Sequence
  Synthetic: Cathepsin S sensitive site
VTIIGPATVGGIKPGCFK

SEQ ID NO: 851 - protein, 20 aa, Artificial Sequence
  Synthetic: Cathepsin S sensitive site
FSLPGMEHVYGIPEHADNLR

SEQ ID NO: 852 - protein, 18 aa, Artificial Sequence
  Synthetic: Cathepsin S sensitive site
LPPSGAVPVTGIPPHVVK

SEQ ID NO: 853 - protein, 13 aa, Artificial Sequence
  Synthetic: Cathepsin S sensitive site
MDGIVPDIAVGTK

SEQ ID NO: 854 - protein, 9 aa, Artificial Sequence
  Synthetic: Cathepsin S sensitive site
RGIWHNDNK

SEQ ID NO: 855 - protein, 20 aa, Artificial Sequence
  Synthetic: Cathepsin S sensitive site
GKPEIEGKPESEGEPGSETR

SEQ ID NO: 856 - protein, 22 aa, Artificial Sequence
  Synthetic: Cathepsin S sensitive site
YDINAHACVTGKPISQGGIHGR

SEQ ID NO: 857 - protein, 20 aa, Artificial Sequence
  Synthetic: Cathepsin S sensitive site
ELTQQLAQATGKPPQYIAVH

SEQ ID NO: 858 - protein, 17 aa, Artificial Sequence
  Synthetic: Cathepsin S sensitive site
NPKPFLNGLTGKPVMVK

SEQ ID NO: 859 - protein, 16 aa, Artificial Sequence
  Synthetic: Cathepsin S sensitive site
CPSILGGLAPEKDQPK

SEQ ID NO: 860 - protein, 21 aa, Artificial Sequence
  Synthetic: Cathepsin S sensitive site
  misc_feature (10)..(10): Xaa can be any naturally occurring amino acid
VASGIPAGWXGLDCGPESSKK

SEQ ID NO: 861 - protein, 12 aa, Artificial Sequence
  Synthetic: Cathepsin S sensitive site
QVLQGLDYLHSK

SEQ ID NO: 862 - protein, 14 aa, Artificial Sequence
  Synthetic: Cathepsin S sensitive site
GALEGLPRPPPPVK

SEQ ID NO: 863 - protein, 16 aa, Artificial Sequence
  Synthetic: Cathepsin S sensitive site
LFIGGLSFETTDESLR

SEQ ID NO: 864 - protein, 16 aa, Artificial Sequence
  Synthetic: Cathepsin S sensitive site
VFVGGLSPDTSEEQIK

SEQ ID NO: 865 - protein, 13 aa, Artificial Sequence
  Synthetic: Cathepsin S sensitive site
  misc_feature (3)..(3): Xaa can be any naturally occurring amino acid
MFXGGLSWDTSKK

SEQ ID NO: 866 - protein, 20 aa, Artificial Sequence
  Synthetic: Cathepsin S sensitive site
NVIIWGNHSSTQYPDVNHAK

SEQ ID NO: 867 - protein, 19 aa, Artificial Sequence
  Synthetic: Cathepsin S sensitive site
LLSGLAEGLGGNIEQLVAR

SEQ ID NO: 868 - protein, 14 aa, Artificial Sequence
  Synthetic: Cathepsin S sensitive site
LVINGNPITIFQER

SEQ ID NO: 869 - protein, 16 aa, Artificial Sequence
  Synthetic: Cathepsin S sensitive site
SAAMLGNSEDHTALSR

SEQ ID NO: 870 - protein, 11 aa, Artificial Sequence
  Synthetic: Cathepsin S sensitive site
IFQGNVHNFEK

SEQ ID NO: 871 - protein, 15 aa, Artificial Sequence
  Synthetic: Cathepsin S sensitive site
NNPPTLEGNYSKPLK

SEQ ID NO: 872 - protein, 11 aa, Artificial Sequence
  Synthetic: Cathepsin S sensitive site
MVGPAVIVDKK

SEQ ID NO: 873 - protein, 14 aa, Artificial Sequence
  Synthetic: Cathepsin S sensitive site
MMLGPEGGEGFVVK

SEQ ID NO: 874 - protein, 16 aa, Artificial Sequence
  Synthetic: Cathepsin S sensitive site
SIYEALGGPHDPNVAK

SEQ ID NO: 875 - protein, 13 aa, Artificial Sequence
  Synthetic: Cathepsin S sensitive site
TFQGPNCPATCGR

SEQ ID NO: 876 - protein, 11 aa, Artificial Sequence
  Synthetic: Cathepsin S sensitive site
IMGPNYTPGKK

SEQ ID NO: 877 - protein, 13 aa, Artificial Sequence
  Synthetic: Cathepsin S sensitive site
MVIITGPPEAQFK

SEQ ID NO: 878 - protein, 20 aa, Artificial Sequence
  Synthetic: Cathepsin S sensitive site
AFGLTDDQVSGPPSAPAEDR

SEQ ID NO: 879 - protein, 14 aa, Artificial Sequence
  Synthetic: Cathepsin S sensitive site
TVQGPPTSDDIFER

SEQ ID NO: 880 - protein, 15 aa, Artificial Sequence
  Synthetic: Cathepsin S sensitive site
FVIGGPQGDAGLTGR

SEQ ID NO: 881 - protein, 13 aa, Artificial Sequence
  Synthetic: Cathepsin S sensitive site
  misc_feature (5)..(5): Xaa can be any naturally occurring amino acid
IITLXGPTNAIFK

SEQ ID NO: 882 - protein, 21 aa, Artificial Sequence
  Synthetic: Cathepsin S sensitive site
KPPTLIHGQAPSAGLPSQKPK

SEQ ID NO: 883 - protein, 11 aa, Artificial Sequence
  Synthetic: Cathepsin S sensitive site
RGQGGYPGKPR

SEQ ID NO: 884 - protein, 18 aa, Artificial Sequence
  Synthetic: Cathepsin S sensitive site
  misc_feature (6)..(6): Xaa can be any naturally occurring amino acid
RPDNFXFGQSGAGNNWAK

SEQ ID NO: 885 - protein, 18 aa, Artificial Sequence
  Synthetic: Cathepsin S sensitive site
GLLALSSALSGQSHLAIK

SEQ ID NO: 886 - protein, 22 aa, Artificial Sequence
  Synthetic: Cathepsin S sensitive site
ALPPVLTTVNGQSPPEHSAPAK

SEQ ID NO: 887 - protein, 13 aa, Artificial Sequence
  Synthetic: Cathepsin S sensitive site
QSGYGGQTKPIFR

SEQ ID NO: 888 - protein, 11 aa, Artificial Sequence
  Synthetic: Cathepsin S sensitive site
LSGQTNIHLSK

SEQ ID NO: 889 - protein, 18 aa, Artificial Sequence
  Synthetic: Cathepsin S sensitive site
VVLMSHLGRPDGVPMPDK

SEQ ID NO: 890 - protein, 19 aa, Artificial Sequence
  Synthetic: Cathepsin S sensitive site
VVLMSHLGRPDGVPMPDKY

SEQ ID NO: 891 - protein, 17 aa, Artificial Sequence
  Synthetic: Cathepsin S sensitive site
QQSIAGSADSKPIDVSR

SEQ ID NO: 892 - protein, 20 aa, Artificial Sequence
  Synthetic: Cathepsin S sensitive site
VTLGPVPEIGGSEAPAPQNK

SEQ ID NO: 893 - protein, 22 aa, Artificial Sequence
  Synthetic: Cathepsin S sensitive site
NFGGSFAGSFGGAGGHAPGVAR

SEQ ID NO: 894 - protein, 17 aa, Artificial Sequence
  Synthetic: Cathepsin S sensitive site
MMDYLQGSGETPQTDVR

SEQ ID NO: 895 - protein, 18 aa, Artificial Sequence
  Synthetic: Cathepsin S sensitive site
DSVWGSGGGQQSVNHLVK

SEQ ID NO: 896 - protein, 17 aa, Artificial Sequence
  Synthetic: Cathepsin S sensitive site
PQVAIICGSGLGGLTDK

SEQ ID NO: 897 - protein, 28 aa, Artificial Sequence
  Synthetic: Cathepsin S sensitive site
PTSSEQGGLEGSGSAAGEGKPALSEEER

SEQ ID NO: 898 - protein, 22 aa, Artificial Sequence
  Synthetic: Cathepsin S sensitive site
TVEQLLTGSPTSPTVEPEKPTR

SEQ ID NO: 899 - protein, 14 aa, Artificial Sequence
  Synthetic: Cathepsin S sensitive site
GCLEGSQGTQALHK

SEQ ID NO: 900 - protein, 22 aa, Artificial Sequence
  Synthetic: Cathepsin S sensitive site
LLAVSAPALQGSRPGETEENVR

SEQ ID NO: 901 - protein, 20 aa, Artificial Sequence
  Synthetic: Cathepsin S sensitive site
  misc_feature (2)..(3): Xaa can be any naturally occurring amino acid
IXXGSSGAQGSGGGSTSAHY

SEQ ID NO: 902 - protein, 15 aa, Artificial Sequence
  Synthetic: Cathepsin S sensitive site
VAFTGSTEVGHLIQK

SEQ ID NO: 903 - protein, 16 aa, Artificial Sequence
  Synthetic: Cathepsin S sensitive site
VVVLMGSTSDLGHCEK

SEQ ID NO: 904 - protein, 17 aa, Artificial Sequence
  Synthetic: Cathepsin S sensitive site
MVELLGSYTEDNASQAR

SEQ ID NO: 905 - protein, 14 aa, Artificial Sequence
  Synthetic: Cathepsin S sensitive site
IYWGTATTGKPHVA

SEQ ID NO: 906 - protein, 15 aa, Artificial Sequence
  Synthetic: Cathepsin S sensitive site
IVGFCWGGTAVHHLM

SEQ ID NO: 907 - protein, 23 aa, Artificial Sequence
  Synthetic: Cathepsin S sensitive site
GVVPLAGTDGETTTQGLDGLSER

SEQ ID NO: 908 - protein, 16 aa, Artificial Sequence
  Synthetic: Cathepsin S sensitive site
  misc_feature (2)..(2): Xaa can be any naturally occurring amino acid
  misc_feature (4)..(4): Xaa can be any naturally occurring amino acid
  misc_feature (6)..(6): Xaa can be any naturally occurring amino acid
GXVXFXGTDHIDQWNK

SEQ ID NO: 909 - protein, 12 aa, Artificial Sequence
  Synthetic: Cathepsin S sensitive site
SVSGTDVQEECR

SEQ ID NO: 910 - protein, 14 aa, Artificial Sequence
  Synthetic: Cathepsin S sensitive site
MMLGTEGGEGFVVK

SEQ ID NO: 911 - protein, 20 aa, Artificial Sequence
  Synthetic: Cathepsin S sensitive site
IAFHQDGSLAGTGGLDAFGR

SEQ ID NO: 912 - protein, 16 aa, Artificial Sequence
  Synthetic: Cathepsin S sensitive site
LNFSHGTHEYHAETIK

SEQ ID NO: 913 - protein, 15 aa, Artificial Sequence
  Synthetic: Cathepsin S sensitive site
LVLGTHTSDEQNHLV

SEQ ID NO: 914 - protein, 22 aa, Artificial Sequence
  Synthetic: Cathepsin S sensitive site
ALHWLVLGTHTSDEQNHLVVAR

SEQ ID NO: 915 - protein, 13 aa, Artificial Sequence
  Synthetic: Cathepsin S sensitive site
VLSGTIHAGQPVK

SEQ ID NO: 916 - protein, 16 aa, Artificial Sequence
  Synthetic: Cathepsin S sensitive site
IITITGTQDQIQNAQY

SEQ ID NO: 917 - protein, 11 aa, Artificial Sequence
  Synthetic: Cathepsin S sensitive site
GGTSDVEVNEK

SEQ ID NO: 918 - protein, 16 aa, Artificial Sequence
  Synthetic: Cathepsin S sensitive site
VLTGVAGEDAECHAAK

SEQ ID NO: 919 - protein, 20 aa, Artificial Sequence
  Synthetic: Cathepsin S sensitive site
TGGVDTAAVGGVFDVSNADR

SEQ ID NO: 920 - protein, 16 aa, Artificial Sequence
  Synthetic: Cathepsin S sensitive site
FIVDGWHEMDAENPLH

SEQ ID NO: 921 - protein, 26 aa, Artificial Sequence
  Synthetic: Cathepsin S sensitive site
TMFSSEVQFGHAGACANQASETAVAK

SEQ ID NO: 922 - protein, 22 aa, Artificial Sequence
  Synthetic: Cathepsin S sensitive site
PIYDVLQMVGHANRPLQDDEGR

SEQ ID NO: 923 - protein, 10 aa, Artificial Sequence
  Synthetic: Cathepsin S sensitive site
EWAHATIIPK

SEQ ID NO: 924 - protein, 10 aa, Artificial Sequence
  Synthetic: Cathepsin S sensitive site
KHEANNPQLK

SEQ ID NO: 925 - protein, 10 aa, Artificial Sequence
  Synthetic: Cathepsin S sensitive site
MVNHFIAEFK

SEQ ID NO: 926 - protein, 10 aa, Artificial Sequence
  Synthetic: Cathepsin S sensitive site
  misc_feature (3)..(3): Xaa can be any naturally occurring amino acid
LVXHFVEEFK

SEQ ID NO: 927 - protein, 17 aa, Artificial Sequence
  Synthetic: Cathepsin S sensitive site
MPFPVNHGASSEDTLLK

SEQ ID NO: 928 - protein, 23 aa, Artificial Sequence
  Synthetic: Cathepsin S sensitive site
  misc_feature (2)..(2): Xaa can be any naturally occurring amino acid
NXCWELYCLEHGIQPDGQMPSDK

SEQ ID NO: 929 - protein, 23 aa, Artificial Sequence
  Synthetic: Cathepsin S sensitive site
  misc_feature (2)..(2): Xaa can be any naturally occurring amino acid
NXCWELYCLEHGIQPDGQMPSDK

SEQ ID NO: 930 - protein, 20 aa, Artificial Sequence
  Synthetic: Cathepsin S sensitive site
VHAGPFANIAHGNSSIIADR

SEQ ID NO: 931 - protein, 18 aa, Artificial Sequence
  Synthetic: Cathepsin S sensitive site
INQVFHGSCITEGNELTK

SEQ ID NO: 932 - protein, 15 aa, Artificial Sequence
  Synthetic: Cathepsin S sensitive site
FELQHGTEEQQEEVR

SEQ ID NO: 933 - protein, 18 aa, Artificial Sequence
  Synthetic: Cathepsin S sensitive site
EQQEAIEHIDEVQNEIDR

SEQ ID NO: 934 - protein, 21 aa, Artificial Sequence
  Synthetic: Cathepsin S sensitive site
AVEALAAALAHISGATSVDQR

SEQ ID NO: 935 - protein, 13 aa, Artificial Sequence
  Synthetic: Cathepsin S sensitive site
RHLAPTGNAPASR

SEQ ID NO: 936 - protein, 18 aa, Artificial Sequence
  Synthetic: Cathepsin S sensitive site
LLTDFCTHLPNLPDSTAK

SEQ ID NO: 937 - protein, 16 aa, Artificial Sequence
  Synthetic: Cathepsin S sensitive site
VDEFVTHNLSFDEINK

SEQ ID NO: 938 - protein, 19 aa, Artificial Sequence
  Synthetic: Cathepsin S sensitive site
ATLELTHNWGTEDDETQSY

SEQ ID NO: 939 - protein, 16 aa, Artificial Sequence
  Synthetic: Cathepsin S sensitive site
EEFTAFLHPEEYDYMK

SEQ ID NO: 940 - protein, 12 aa, Artificial Sequence
  Synthetic: Cathepsin S sensitive site
  misc_feature (2)..(2): Xaa can be any naturally occurring amino acid
QXFHPEQLITGK

SEQ ID NO: 941 - protein, 23 aa, Artificial Sequence
  Synthetic: Cathepsin S sensitive site
PVTHNLPTVAHPSQAPSPNQPTK

SEQ ID NO: 942 - protein, 17 aa, Artificial Sequence
  Synthetic: Cathepsin S sensitive site
  misc_feature (2)..(6): Xaa can be any naturally occurring amino acid
AXXXXXQHQAGQAPHLG

SEQ ID NO: 943 - protein, 17 aa, Artificial Sequence
  Synthetic: Cathepsin S sensitive site
CNFTDGALVQHQEWDGK

SEQ ID NO: 944 - protein, 13 aa, Artificial Sequence
  Synthetic: Cathepsin S sensitive site
GVLHQFSGTETNK

SEQ ID NO: 945 - protein, 16 aa, Artificial Sequence
  Synthetic: Cathepsin S sensitive site
QIGAVVSHQSSVIPDR

SEQ ID NO: 946 - protein, 19 aa, Artificial Sequence
  Synthetic: Cathepsin S sensitive site
IEPNEVTHSGDTGVETDGR

SEQ ID NO: 947 - protein, 15 aa, Artificial Sequence
  Synthetic: Cathepsin S sensitive site
HYAHTDCPGHADYVK

SEQ ID NO: 948 - protein, 11 aa, Artificial Sequence
  Synthetic: Cathepsin S sensitive site
TICSHVQNMIK

SEQ ID NO: 949 - protein, 13 aa, Artificial Sequence
  Synthetic: Cathepsin S sensitive site
LLGHWEEAAHDLA

SEQ ID NO: 950 - protein, 12 aa, Artificial Sequence
  Synthetic: Cathepsin S sensitive site
TYTIANQFPLNK

SEQ ID NO: 951 - protein, 17 aa, Artificial Sequence
  Synthetic: Cathepsin S sensitive site
  misc_feature (4)..(4): Xaa can be any naturally occurring amino acid
NPTXFFDIAVDGEPLGR

SEQ ID NO: 952 - protein, 15 aa, Artificial Sequence
  Synthetic: Cathepsin S sensitive site
LVSIGAEEIVDGNAK

SEQ ID NO: 953 - protein, 21 aa, Artificial Sequence
  Synthetic: Cathepsin S sensitive site
TTDGVYEGVAIGGDRYPGSTF

SEQ ID NO: 954 - protein, 15 aa, Artificial Sequence
  Synthetic: Cathepsin S sensitive site
THINIVVIGHVDSGK

SEQ ID NO: 955 - protein, 19 aa, Artificial Sequence
  Synthetic: Cathepsin S sensitive site
DNDFCGTDMTIGTDSALHR

SEQ ID NO: 956 - protein, 18 aa, Artificial Sequence
  Synthetic: Cathepsin S sensitive site
  misc_feature (3)..(3): Xaa can be any naturally occurring amino acid
VLXNMEIGTSLFDEEGAK

SEQ ID NO: 957 - protein, 16 aa, Artificial Sequence
  Synthetic: Cathepsin S sensitive site
VCTLAIIDPGDSDIIR

SEQ ID NO: 958 - protein, 17 aa, Artificial Sequence
  Synthetic: Cathepsin S sensitive site
GCITIIGGGDTATCCAK

SEQ ID NO: 959 - protein, 14 aa, Artificial Sequence
  Synthetic: Cathepsin S sensitive site
TFNQVEIKPEMIGH

SEQ ID NO: 960 - protein, 13 aa, Artificial Sequence
  Synthetic: Cathepsin S sensitive site
CQLEINFNTLQTK

SEQ ID NO: 961 - protein, 12 aa, Artificial Sequence
  Synthetic: Cathepsin S sensitive site
HLEINPDHPIVE

SEQ ID NO: 962 - protein, 15 aa, Artificial Sequence
  Synthetic: Cathepsin S sensitive site
HLEINPDHSIIETLR

SEQ ID NO: 963 - protein, 18 aa, Artificial Sequence
  Synthetic: Cathepsin S sensitive site
VPYLIAGIQHSCQDIGAK

SEQ ID NO: 964 - protein, 10 aa, Artificial Sequence
  Synthetic: Cathepsin S sensitive site
VLSIQSHVIR

SEQ ID NO: 965 - protein, 10 aa, Artificial Sequence
  Synthetic: Cathepsin S sensitive site
ELGITALHIK

SEQ ID NO: 966 - protein, 10 aa, Artificial Sequence
  Synthetic: Cathepsin S sensitive site
LVAIVDPHIK

SEQ ID NO: 967 - protein, 13 aa, Artificial Sequence
  Synthetic: Cathepsin S sensitive site
TLTIVDTGIGMTK

SEQ ID NO: 968 - protein, 12 aa, Artificial Sequence
  Synthetic: Cathepsin S sensitive site
LVAIVDVIDQNR

SEQ ID NO: 969 - protein, 14 aa, Artificial Sequence
  Synthetic: Cathepsin S sensitive site
QIILEKEETEELKR

SEQ ID NO: 970 - protein, 10 aa, Artificial Sequence
  Synthetic: Cathepsin S sensitive site
  misc_feature (1)..(1): Xaa can be any naturally occurring amino acid
XKHPDADSLY

SEQ ID NO: 971 - protein, 15 aa, Artificial Sequence
  Synthetic: Cathepsin S sensitive site
CIGKPGGSLDNSEQK

SEQ ID NO: 972 - protein, 24 aa, Artificial Sequence
  Synthetic: Cathepsin S sensitive site
HHIYLEGTLLKPNMVTPGHACTQK

SEQ ID NO: 973 - protein, 19 aa, Artificial Sequence
  Synthetic: Cathepsin S sensitive site
LTQQLAQATGKPPQYIAVH

SEQ ID NO: 974 - protein, 25 aa, Artificial Sequence
  Synthetic: Cathepsin S sensitive site
SSPPELPDVMKPQDSGSSANEQAVQ

SEQ ID NO: 975 - protein, 13 aa, Artificial Sequence
  Synthetic: Cathepsin S sensitive site
LQELEKYPGIQTR

SEQ ID NO: 976 - protein, 12 aa, Artificial Sequence
  Synthetic: Cathepsin S sensitive site
WIGLDLSNGKPR

SEQ ID NO: 977 - protein, 14 aa, Artificial Sequence
  Synthetic: Cathepsin S sensitive site
MPFLELDTNLPANR

SEQ ID NO: 978 - protein, 20 aa, Artificial Sequence
  Synthetic: Cathepsin S sensitive site
ETALLSSGFSLEDPQTHANR

SEQ ID NO: 979 - protein, 17 aa, Artificial Sequence
  Synthetic: Cathepsin S sensitive site
EAFSLFDKDGDGTITTK

SEQ ID NO: 980 - protein, 11 aa, Artificial Sequence
  Synthetic: Cathepsin S sensitive site
YELGRPAANTK

SEQ ID NO: 981 - protein, 20 aa, Artificial Sequence
  Synthetic: Cathepsin S sensitive site
GNPICSLHDQGAGGNGNVLK

SEQ ID NO: 982 - protein, 16 aa, Artificial Sequence
  Synthetic: Cathepsin S sensitive site
VILHLKEDQTEYLEER

SEQ ID NO: 983 - protein, 20 aa, Artificial Sequence
  Synthetic: Cathepsin S sensitive site
IQQLCEDIIQLKPDVVITEK

SEQ ID NO: 984 - protein, 20 aa, Artificial Sequence
  Synthetic: Cathepsin S sensitive site
IQQLCEDIIQLKPDVVITEK

SEQ ID NO: 985 - protein, 10 aa, Artificial Sequence
  Synthetic: Cathepsin S sensitive site
TLNNDIMLIK

SEQ ID NO: 986 - protein, 15 aa, Artificial Sequence
  Synthetic: Cathepsin S sensitive site
NQVALNPQNTVFDAK

SEQ ID NO: 987 - protein, 15 aa, Artificial Sequence
  Synthetic: Cathepsin S sensitive site
NQVALNPQNTVFDAK

SEQ ID NO: 988 - protein, 19 aa, Artificial Sequence
  Synthetic: Cathepsin S sensitive site
STATLAWGVNLPAHTVIIK

SEQ ID NO: 989 - protein, 13 aa, Artificial Sequence
  Synthetic: Cathepsin S sensitive site
  misc_feature (2)..(2): Xaa can be any naturally occurring amino acid
EXLELPEDEEEKK

SEQ ID NO: 990 - protein, 17 aa, Artificial Sequence
  Synthetic: Cathepsin S sensitive site
GVNLPGAAVDLPAVSEK

SEQ ID NO: 991 - protein, 10 aa, Artificial Sequence
  Synthetic: Cathepsin S sensitive site
RLPPAAGDEP

SEQ ID NO: 992 - protein, 9 aa, Artificial Sequence
  Synthetic: Cathepsin S sensitive site
LDLPPYETF

SEQ ID NO: 993 - protein, 18 aa, Artificial Sequence
  Synthetic: Cathepsin S sensitive site
DGDSVMVLPTIPEEEAKK

SEQ ID NO: 994 - protein, 17 aa, Artificial Sequence
  Synthetic: Cathepsin S sensitive site
EIVHLQAGQCGNQIGAK

SEQ ID NO: 995 - protein, 20 aa, Artificial Sequence
  Synthetic: Cathepsin S sensitive site
DVSIEDSVISLSGDHCIIGR

SEQ ID NO: 996 - protein, 20 aa, Artificial Sequence
  Synthetic: Cathepsin S sensitive site
SSAPGPLELDLTGDLESFKK

SEQ ID NO: 997 - protein, 11 aa, Artificial Sequence
  Synthetic: Cathepsin S sensitive site
FLEMCNDLLAR

SEQ ID NO: 998 - protein, 15 aa, Artificial Sequence
  Synthetic: Cathepsin S sensitive site
TTGFGMIYDSLDYAK

SEQ ID NO: 999 - protein, 12 aa, Artificial Sequence
  Synthetic: Cathepsin S sensitive site
  misc_feature (1)..(1): Xaa can be any naturally occurring amino acid
XMNPTNTVFDAK

SEQ ID NO: 1000 - protein, 12 aa, Artificial Sequence
  Synthetic: Cathepsin S sensitive site
EDAMAMVDHCLK

SEQ ID NO: 1001 - protein, 18 aa, Artificial Sequence
  Synthetic: Cathepsin S sensitive site
  misc_feature (3)..(3): Xaa can be any naturally occurring amino acid
  misc_feature (5)..(5): Xaa can be any naturally occurring amino acid
  misc_feature (9)..(9): Xaa can be any naturally occurring amino acid
ANXVXSGGXTMYPGIADR

SEQ ID NO: 1002 - protein, 18 aa, Artificial Sequence
  Synthetic: Cathepsin S sensitive site
ALQDLENAASGDAAVHQR

SEQ ID NO: 1003 - protein, 15 aa, Artificial Sequence
  Synthetic: Cathepsin S sensitive site
DPVTNLNNAFEVAEK

SEQ ID NO: 1004 - protein, 13 aa, Artificial Sequence
  Synthetic: Cathepsin S sensitive site
  misc_feature (1)..(1): Xaa can be any naturally occurring amino acid
XNAGPNTNGSQFF

SEQ ID NO: 1005 - protein, 18 aa, Artificial Sequence
  Synthetic: Cathepsin S sensitive site
NYSVFYYEIQNAPEQACH

SEQ ID NO: 1006 - protein, 14 aa, Artificial Sequence
  Synthetic: Cathepsin S sensitive site
ELISNASDALDKIR

SEQ ID NO: 1007 - protein, 24 aa, Artificial Sequence
  Synthetic: Cathepsin S sensitive site
YYFNHITNASQWERPSGNSSSGGK

SEQ ID NO: 1008 - protein, 11 aa, Artificial Sequence
  Synthetic: Cathepsin S sensitive site
TNDWEDHLAVK

SEQ ID NO: 1009 - protein, 13 aa, Artificial Sequence
  Synthetic: Cathepsin S sensitive site
AFHNEAQVNPERK

SEQ ID NO: 1010 - protein, 13 aa, Artificial Sequence
  Synthetic: Cathepsin S sensitive site
NCLTNFHGMDLTR

SEQ ID NO: 1011 - protein, 14 aa, Artificial Sequence
  Synthetic: Cathepsin S sensitive site
TNVANFPGHSGPIT

SEQ ID NO: 1012 - protein, 18 aa, Artificial Sequence
  Synthetic: Cathepsin S sensitive site
ILNNGHAFNVEFDDSQDK

SEQ ID NO: 1013 - protein, 14 aa, Artificial Sequence
  Synthetic: Cathepsin S sensitive site
IEQLQNHENEDIYK

SEQ ID NO: 1014 - protein, 23 aa, Artificial Sequence
  Synthetic: Cathepsin S sensitive site
PVFVHAGPFANIAHGNSSIIADR

SEQ ID NO: 1015 - protein, 14 aa, Artificial Sequence
  Synthetic: Cathepsin S sensitive site
VWYVSNIDGTHIAK

SEQ ID NO: 1016 - protein, 19 aa, Artificial Sequence
  Synthetic: Cathepsin S sensitive site
CDEVMQLLLENLGNENVHR

SEQ ID NO: 1017 - protein, 19 aa, Artificial Sequence
  Synthetic: Cathepsin S sensitive site
QDQRPLHPVANPHAEISTK

SEQ ID NO: 1018 - protein, 12 aa, Artificial Sequence
  Synthetic: Cathepsin S sensitive site
  misc_feature (1)..(1): Xaa can be any naturally occurring amino acid
XNPLDAGAAEPI

SEQ ID NO: 1019 - protein, 19 aa, Artificial Sequence
  Synthetic: Cathepsin S sensitive site
LIPQLVANVTNPNSTEHMK

SEQ ID NO: 1020 - protein, 16 aa, Artificial Sequence
  Synthetic: Cathepsin S sensitive site
SAAMLGNSEDHTALSR

SEQ ID NO: 1021 - protein, 29 aa, Artificial Sequence
  Synthetic: Cathepsin S sensitive site
NYQQNYQNSESGEKNEGSESAPEGQAQQR

SEQ ID NO: 1022 - protein, 18 aa, Artificial Sequence
  Synthetic: Cathepsin S sensitive site
LGEMWNNTAADDKQPYEK

SEQ ID NO: 1023 - protein, 17 aa, Artificial Sequence
  Synthetic: Cathepsin S sensitive site
IMQNTDPHSQEYVEHLK

SEQ ID NO: 1024 - protein, 14 aa, Artificial Sequence
  Synthetic: Cathepsin S sensitive site
ILIANTGMDTDKIK

SEQ ID NO: 1025 - protein, 20 aa, Artificial Sequence
  Synthetic: Cathepsin S sensitive site
AWVWNTHADFADECPKPELL

SEQ ID NO: 1026 - protein, 18 aa, Artificial Sequence
  Synthetic: Cathepsin S sensitive site
DHASIQMNVAEVDKVTGR

SEQ ID NO: 1027 - protein, 12 aa, Artificial Sequence
  Synthetic: Cathepsin S sensitive site
ALANVNIGSLIC

SEQ ID NO: 1028 - protein, 13 aa, Artificial Sequence
  Synthetic: Cathepsin S sensitive site
  misc_feature (4)..(5): Xaa can be any naturally occurring amino acid
EHGXXTNWDDMEK

SEQ ID NO: 1029 - protein, 16 aa, Artificial Sequence
  Synthetic: Cathepsin S sensitive site
SAAQAAAQTNSNAAGK

SEQ ID NO: 1030 - protein, 19 aa, Artificial Sequence
  Synthetic: Cathepsin S sensitive site
EETFEAAMLGQAEEVVQER

SEQ ID NO: 1031 - protein, 18 aa, Artificial Sequence
  Synthetic: Cathepsin S sensitive site
PPYDEQTQAFIDAAQEAR

SEQ ID NO: 1032 - protein, 15 aa, Artificial Sequence
  Synthetic: Cathepsin S sensitive site
LEQGQAIDDLMPAQK

SEQ ID NO: 1033 - protein, 16 aa, Artificial Sequence
  Synthetic: Cathepsin S sensitive site
SLHQAIEGDTSGDFLK

SEQ ID NO: 1034 - protein, 16 aa, Artificial Sequence
  Synthetic: Cathepsin S sensitive site
QLQQAQAAGAEQEVEK

SEQ ID NO: 1035 - protein, 19 aa, Artificial Sequence
  Synthetic: Cathepsin S sensitive site
YLEVVLNTLQQASQAQVDK

SEQ ID NO: 1036 - protein, 19 aa, Artificial Sequence
  Synthetic: Cathepsin S sensitive site
YLEVVLNTLQQASQAQVDK

SEQ ID NO: 1037 - protein, 20 aa, Artificial Sequence
  Synthetic: Cathepsin S sensitive site
FLSELTQQLAQATGKPPQYI

SEQ ID NO: 1038 - protein, 21 aa, Artificial Sequence
  Synthetic: Cathepsin S sensitive site
FLSELTQQLAQATGKPPQYIA

SEQ ID NO: 1039 - protein, 23 aa, Artificial Sequence
  Synthetic: Cathepsin S sensitive site
FLSELTQQLAQATGKPPQYIAVH

SEQ ID NO: 1040 - protein, 14 aa, Artificial Sequence
  Synthetic: Cathepsin S sensitive site
MTSMGQATWSDPHK

SEQ ID NO: 1041 - protein, 19 aa, Artificial Sequence
  Synthetic: Cathepsin S sensitive site
EELGLIEQAYDNPHEALSR

SEQ ID NO: 1042 - protein, 17 aa, Artificial Sequence
  Synthetic: Cathepsin S sensitive site
SLGTIQQCCDAIDHLCR

SEQ ID NO: 1043 - protein, 25 aa, Artificial Sequence
  Synthetic: Cathepsin S sensitive site
AAAAAAQQQQQCGGGGATKPAVSGK

SEQ ID NO: 1044 - protein, 15 aa, Artificial Sequence
  Synthetic: Cathepsin S sensitive site
NSCNQCNEPRPEDSR

SEQ ID NO: 1045 - protein, 19 aa, Artificial Sequence
  Synthetic: Cathepsin S sensitive site
VLIAFAQYLQQCPFEDHVK

SEQ ID NO: 1046 - protein, 14 aa, Artificial Sequence
  Synthetic: Cathepsin S sensitive site
DSLLQDGEFSMDLR

SEQ ID NO: 1047 - protein, 18 aa, Artificial Sequence
  Synthetic: Cathepsin S sensitive site
YFLGSIVNFSQDPDVHFK

SEQ ID NO: 1048 - protein, 18 aa, Artificial Sequence
  Synthetic: Cathepsin S sensitive site
VFSWLQQEGHLSEEEMAR

SEQ ID NO: 1049 - protein, 12 aa, Artificial Sequence
  Synthetic: Cathepsin S sensitive site
VMSQEIQEQLHK

SEQ ID NO: 1050 - protein, 11 aa, Artificial Sequence
  Synthetic: Cathepsin S sensitive site
KQEPVKPEEGR

SEQ ID NO: 1051 - protein, 18 aa, Artificial Sequence
  Synthetic: Cathepsin S sensitive site
LWYCDLQQESSGIAGILK

SEQ ID NO: 1052 - protein, 14 aa, Artificial Sequence
  Synthetic: Cathepsin S sensitive site
KQEYDESGPSIVHR

SEQ ID NO: 1053 - protein, 19 aa, Artificial Sequence
  Synthetic: Cathepsin S sensitive site
ETEAICFFVQQFTDMEHNR

SEQ ID NO: 1054 - protein, 13 aa, Artificial Sequence
  Synthetic: Cathepsin S sensitive site
VTEQGAELSNEER

SEQ ID NO: 1055 - protein, 17 aa, Artificial Sequence
  Synthetic: Cathepsin S sensitive site
AYMGNVLQGGEGQAPTR

SEQ ID NO: 1056 - protein, 14 aa, Artificial Sequence
  Synthetic: Cathepsin S sensitive site
AVTEQGHELSNEER

SEQ ID NO: 1057 - protein, 18 aa, Artificial Sequence
  Synthetic: Cathepsin S sensitive site
VAHTFVVDVAQGTQVTGR

SEQ ID NO: 1058 - protein, 11 aa, Artificial Sequence
  Synthetic: Cathepsin S sensitive site
VGQGYPHDPPK

SEQ ID NO: 1059 - protein, 18 aa, Artificial Sequence
  Synthetic: Cathepsin S sensitive site
IYAVEASTMAQHAEVLVK

SEQ ID NO: 1060 - protein, 21 aa, Artificial Sequence
  Synthetic: Cathepsin S sensitive site
TLAIYFEVVNQHNAPIPQGGR

SEQ ID NO: 1061 - protein, 18 aa, Artificial Sequence
  Synthetic: Cathepsin S sensitive site
ELAQIAGRPTEDEDEKEK

SEQ ID NO: 1062 - protein, 18 aa, Artificial Sequence
  Synthetic: Cathepsin S sensitive site
MDEMATTQISKDELDELK

SEQ ID NO: 1063 - protein, 15 aa, Artificial Sequence
  Synthetic: Cathepsin S sensitive site
YPHLGQKPGGSDFLR

SEQ ID NO: 1064 - protein, 19 aa, Artificial Sequence
  Synthetic: Cathepsin S sensitive site
TMLELLNQLDGFQPNTQVK

SEQ ID NO: 1065 - protein, 19 aa, Artificial Sequence
  Synthetic: Cathepsin S sensitive site
ILLELLNQMDGFDQNVNVK

SEQ ID NO: 1066 - protein, 13 aa, Artificial Sequence
  Synthetic: Cathepsin S sensitive site
LLNQMDGFDTLHR

SEQ ID NO: 1067 - protein, 20 aa, Artificial Sequence
  Synthetic: Cathepsin S sensitive site
FQESAEAILGQNAAYLGELK

SEQ ID NO: 1068 - protein, 21 aa, Artificial Sequence
  Synthetic: Cathepsin S sensitive site
HPCFIIAEIGQNHQGDLDVAK

SEQ ID NO: 1069 - protein, 22 aa, Artificial Sequence
  Synthetic: Cathepsin S sensitive site
LLQDHPWLLSQNLVVKPDQLIK

SEQ ID NO: 1070 - protein, 17 aa, Artificial Sequence
  Synthetic: Cathepsin S sensitive site
ALPAVQQNNLDEDLIRK

SEQ ID NO: 1071 - protein, 13 aa, Artificial Sequence
  Synthetic: Cathepsin S sensitive site
ALGQNPTNAEVLK

SEQ ID NO: 1072 - protein, 14 aa, Artificial Sequence
  Synthetic: Cathepsin S sensitive site
NYQQNYQNSESGEK

SEQ ID NO: 1073 - protein, 29 aa, Artificial Sequence
  Synthetic: Cathepsin S sensitive site
NYQQNYQNSESGEKNEGSESAPEGQAQQR

SEQ ID NO: 1074 - protein, 22 aa, Artificial Sequence
  Synthetic: Cathepsin S sensitive site
CGAPSATQPATAETQHIADQVR

SEQ ID NO: 1075 - protein, 26 aa, Artificial Sequence
  Synthetic: Cathepsin S sensitive site
QAAAAAAQQQQQCGGGGATKPAVSGK

SEQ ID NO: 1076 - protein, 19 aa, Artificial Sequence
  Synthetic: Cathepsin S sensitive site
IDVTDFLSMTQQDSHAPLR

SEQ ID NO: 1077 - protein, 15 aa, Artificial Sequence
  Synthetic: Cathepsin S sensitive site
IGSCTQQDVELHVQK

SEQ ID NO: 1078 - protein, 14 aa, Artificial Sequence
  Synthetic: Cathepsin S sensitive site
LFPLNQQDVPDKFK

SEQ ID NO: 1079 - protein, 18 aa, Artificial Sequence
  Synthetic: Cathepsin S sensitive site
IGQQPQQPGAPPQQDYTK

SEQ ID NO: 1080 - protein, 27 aa, Artificial Sequence
  Synthetic: Cathepsin S sensitive site
HQAAAAAAQQQQQCGGGGATKPAVSGK

SEQ ID NO: 1081 - protein, 12 aa, Artificial Sequence
  Synthetic: Cathepsin S sensitive site
MFTQQQPQELAR

SEQ ID NO: 1082 - protein, 19 aa, Artificial Sequence
  Synthetic: Cathepsin S sensitive site
LQQQQRPEDAEDGAEGGGK

SEQ ID NO: 1083 - protein, 20 aa, Artificial Sequence
  Synthetic: Cathepsin S sensitive site
LQQQQRPEDAEDGAEGGGKR

SEQ ID NO: 1084 - protein, 21 aa, Artificial Sequence
  Synthetic: Cathepsin S sensitive site
SSEADMECLNQRPPENPDTDK

SEQ ID NO: 1085 - protein, 24 aa, Artificial Sequence
  Synthetic: Cathepsin S sensitive site
SSEADMECLNQRPPENPDTDKNVQ

SEQ ID NO: 1086 - protein, 24 aa, Artificial Sequence
  Synthetic: Cathepsin S sensitive site
NVNPESQLIQQSEQSESETAGSTK

SEQ ID NO: 1087 - protein, 17 aa, Artificial Sequence
  Synthetic: Cathepsin S sensitive site
  misc_feature (5)..(5): Xaa can be any naturally occurring amino acid
PDNFXFGQSGAGNNWAK

SEQ ID NO: 1088 - protein, 19 aa, Artificial Sequence
  Synthetic: Cathepsin S sensitive site
SQTCEFNMIEQSGPPHEPR

SEQ ID NO: 1089 - protein, 23 aa, Artificial Sequence
  Synthetic: Cathepsin S sensitive site
SAVLPPEDMSQSGPSGSHPQGPR

SEQ ID NO: 1090 - protein, 15 aa, Artificial Sequence
  Synthetic: Cathepsin S sensitive site
IEFLQSHENQEIYQK

SEQ ID NO: 1091 - protein, 16 aa, Artificial Sequence
  Synthetic: Cathepsin S sensitive site
NTVSQSISGDPEIDKK

SEQ ID NO: 1092 - protein, 15 aa, Artificial Sequence
  Synthetic: Cathepsin S sensitive site
LLIHQSLAGGIIGVK

SEQ ID NO: 1093 - protein, 18 aa, Artificial Sequence
  Synthetic: Cathepsin S sensitive site
  misc_feature (3)..(3): Xaa can be any naturally occurring amino acid
MVXYLANLTQSQIALNEK

SEQ ID NO: 1094 - protein, 22 aa, Artificial Sequence
  Synthetic: Cathepsin S sensitive site
PPKPEPFQFGQSSQKPPVAGGK

SEQ ID NO: 1095 - protein, 21 aa, Artificial Sequence
  Synthetic: Cathepsin S sensitive site
NGNYCVLQMDQSYKPDENEVR

SEQ ID NO: 1096 - protein, 19 aa, Artificial Sequence
  Synthetic: Cathepsin S sensitive site
ILVGDVGQTVDDPYATFVK

SEQ ID NO: 1097 - protein, 18 aa, Artificial Sequence
  Synthetic: Cathepsin S sensitive site
ADDVDLEQVANETHGHVG

SEQ ID NO: 1098 - protein, 19 aa, Artificial Sequence
  Synthetic: Cathepsin S sensitive site
ADDVDLEQVANETHGHVGA

SEQ ID NO: 1099 - protein, 17 aa, Artificial Sequence
  Synthetic: Cathepsin S sensitive site
SINFLHQVCHDQTPTTK

SEQ ID NO: 1100 - protein, 19 aa, Artificial Sequence
  Synthetic: Cathepsin S sensitive site
CTTVAFTQVNSEDKGALAK

SEQ ID NO: 1101 - protein, 12 aa, Artificial Sequence
  Synthetic: Cathepsin S sensitive site
QQLQQVPGLLHR

SEQ ID NO: 1102 - protein, 12 aa, Artificial Sequence
  Synthetic: Cathepsin S sensitive site
SQQYPAARPAEP

SEQ ID NO: 1103 - protein, 18 aa, Artificial Sequence
  Synthetic: Cathepsin S sensitive site
DFCIQVGRNIIHGSDSVK

SEQ ID NO: 1104 - protein, 18 aa, Artificial Sequence
  Synthetic: Cathepsin S sensitive site
VLMSHLGRPDGVPMPDKY

SEQ ID NO: 1105 - protein, 19 aa, Artificial Sequence
  Synthetic: Cathepsin S sensitive site
VLMSHLGRPDGVPMPDKYS

SEQ ID NO: 1106 - protein, 14 aa, Artificial Sequence
  Synthetic: Cathepsin S sensitive site
AQVARPGGDTIFGK

SEQ ID NO: 1107 - protein, 17 aa, Artificial Sequence
  Synthetic: Cathepsin S sensitive site
FMSVQRPGPYDRPGTAR

SEQ ID NO: 1108 - protein, 13 aa, Artificial Sequence
  Synthetic: Cathepsin S sensitive site
VLVERSAAETVTK

SEQ ID NO: 1109 - protein, 14 aa, Artificial Sequence
  Synthetic: Cathepsin S sensitive site
FLPSARSSPASSPE

SEQ ID NO: 1110 - protein, 21 aa, Artificial Sequence
  Synthetic: Cathepsin S sensitive site
RPELGSEGLGSAAHGSQPDLR

SEQ ID NO: 1111 - protein, 17 aa, Artificial Sequence
  Synthetic: Cathepsin S sensitive site
MPDQGMTSADDFFQGTK

SEQ ID NO: 1112 - protein, 22 aa, Artificial Sequence
  Synthetic: Cathepsin S sensitive site
DVPAPSTSADKVESLDVDSEAK

SEQ ID NO: 1113 - protein, 17 aa, Artificial Sequence
  Synthetic: Cathepsin S sensitive site
QVCLPVISAENWKPATK

SEQ ID NO: 1114 - protein, 20 aa, Artificial Sequence
  Synthetic: Cathepsin S sensitive site
GFGSGDDPYSSAEPHVSGVK

SEQ ID NO: 1115 - protein, 21 aa, Artificial Sequence
  Synthetic: Cathepsin S sensitive site
EFGDNTAGCTSAGPHFNPLSR

SEQ ID NO: 1116 - protein, 21 aa, Artificial Sequence
  Synthetic: Cathepsin S sensitive site
TYFSCTSAHTSTGDGTAMITR

SEQ ID NO: 1117 - protein, 14 aa, Artificial Sequence
  Synthetic: Cathepsin S sensitive site
TYSLGSALRPSTSR

SEQ ID NO: 1118 - protein, 17 aa, Artificial Sequence
  Synthetic: Cathepsin S sensitive site
VSDQELQSANASVDDSR

SEQ ID NO: 1119 - protein, 19 aa, Artificial Sequence
  Synthetic: Cathepsin S sensitive site
APGSAAPAAGSAPAAAEEK

SEQ ID NO: 1120 - protein, 19 aa, Artificial Sequence
  Synthetic: Cathepsin S sensitive site
APGSAAPAAGSAPAAAEEK

SEQ ID NO: 1121 - protein, 19 aa, Artificial Sequence
  Synthetic: Cathepsin S sensitive site
APGSAAPAAGSAPAAAEEK

SEQ ID NO: 1122 - protein, 20 aa, Artificial Sequence
  Synthetic: Cathepsin S sensitive site
APGSAAPAAGSAPAAAEEKK

SEQ ID NO: 1123 - protein, 15 aa, Artificial Sequence
  Synthetic: Cathepsin S sensitive site
NEGSESAPEGQAQQR

SEQ ID NO: 1124 - protein, 20 aa, Artificial Sequence
  Synthetic: Cathepsin S sensitive site
QVEPLDPPAGSAPGEHVFVK

SEQ ID NO: 1125 - protein, 18 aa, Artificial Sequence
  Synthetic: Cathepsin S sensitive site
PTGEAGPSCSSASDKLPR

SEQ ID NO: 1126 - protein, 14 aa, Artificial Sequence
  Synthetic: Cathepsin S sensitive site
YYTSASGDEMVSLK

SEQ ID NO: 1127 - protein, 20 aa, Artificial Sequence
  Synthetic: Cathepsin S sensitive site
NQQGAHSALSSASTSSHNLQ

SEQ ID NO: 1128 - protein, 16 aa, Artificial Sequence
  Synthetic: Cathepsin S sensitive site
EALLSSAVDHGSDEVK

SEQ ID NO: 1129 - protein, 19 aa, Artificial Sequence
  Synthetic: Cathepsin S sensitive site
DYMVEIDILASCDHPNIVK

SEQ ID NO: 1130 - protein, 11 aa, Artificial Sequence
  Synthetic: Cathepsin S sensitive site
MESCGIHETTF

SEQ ID NO: 1131 - protein, 12 aa, Artificial Sequence
  Synthetic: Cathepsin S sensitive site
QLSSCLPNIVPK

SEQ ID NO: 1132 - protein, 12 aa, Artificial Sequence
  Synthetic: Cathepsin S sensitive site
  misc_feature (3)..(3): Xaa can be any naturally occurring amino acid
LIXSDGHEFIVK

SEQ ID NO: 1133 - protein, 19 aa, Artificial Sequence
  Synthetic: Cathepsin S sensitive site
EIVDGGVILESDPQQVVHR

SEQ ID NO: 1134 - protein, 15 aa, Artificial Sequence
  Synthetic: Cathepsin S sensitive site
SLEDALSSDTSGHFR

SEQ ID NO: 1135 - protein, 20 aa, Artificial Sequence
  Synthetic: Cathepsin S sensitive site
VGVEAHVDIHSDVPKGANSF

SEQ ID NO: 1136 - protein, 16 aa, Artificial Sequence
  Synthetic: Cathepsin S sensitive site
VILGSEAAQQHPEEVR

SEQ ID NO: 1137 - protein, 10 aa, Artificial Sequence
  Synthetic: Cathepsin S sensitive site
  misc_feature (1)..(1): Xaa can be any naturally occurring amino acid
XSEDKGALAK

SEQ ID NO: 1138 - protein, 20 aa, Artificial Sequence
  Synthetic: Cathepsin S sensitive site
  misc_feature (5)..(6): Xaa can be any naturally occurring amino acid
GGTSXXSSEGTQHSYSEEEK

SEQ ID NO: 1139 - protein, 24 aa, Artificial Sequence
  Synthetic: Cathepsin S sensitive site
CALGGTSELSSEGTQHSYSEEEKY

SEQ ID NO: 1140 - protein, 15 aa, Artificial Sequence
  Synthetic: Cathepsin S sensitive site
MDPNIVGSEHYDVAR

SEQ ID NO: 1141 - protein, 21 aa, Artificial Sequence
  Synthetic: Cathepsin S sensitive site
SPAPSSVPLGSEKPSNVSQDR

SEQ ID NO: 1142 - protein, 20 aa, Artificial Sequence
  Synthetic: Cathepsin S sensitive site
MTQAGVEELESENKIPATQK

SEQ ID NO: 1143 - protein, 13 aa, Artificial Sequence
  Synthetic: Cathepsin S sensitive site
MLLDSEQHPCQLK

SEQ ID NO: 1144 - protein, 37 aa, Artificial Sequence
  Synthetic: Cathepsin S sensitive site
GLGNVLGGLISGAGGGGGGGGGGGGGGGGGGGGTAMR

SEQ ID NO: 1145 - protein, 37 aa, Artificial Sequence
  Synthetic: Cathepsin S sensitive site
IMDDLTEVLCSGAGGVHSGGSGDGAGSGGPGAQNHVK

SEQ ID NO: 1146 - protein, 35 aa, Artificial Sequence; identical to SEQ ID NO: 513
  Synthetic: Cathepsin S sensitive site

SEQ ID NO: 1147 - protein, 22 aa, Artificial Sequence
  Synthetic: Cathepsin S sensitive site
LEPAPLDSLCSGASAEEPTSHR

SEQ ID NO: 1148 - protein, 12 aa, Artificial Sequence
  Synthetic: Cathepsin S sensitive site
VIGSGCNLDSAR

SEQ ID NO: 1149 - protein, 14 aa, Artificial Sequence
  Synthetic: Cathepsin S sensitive site
  misc_feature (2)..(2): Xaa can be any naturally occurring amino acid
WXLNSGDGAFYGPK

SEQ ID NO: 1150 - protein, 22 aa, Artificial Sequence
  Synthetic: Cathepsin S sensitive site
FFDMAYQGFASGDGDKDAWAVR

SEQ ID NO: 1151 - protein, 19 aa, Artificial Sequence
  Synthetic: Cathepsin S sensitive site
VSIEDSVISLSGDHCIIGR

SEQ ID NO: 1152 - protein, 16 aa, Artificial Sequence
  Synthetic: Cathepsin S sensitive site
EYLLSGDISEAEHCLK

SEQ ID NO: 1153 - protein, 14 aa, Artificial Sequence
  Synthetic: Cathepsin S sensitive site
DDGLFSGDPNWFPK

SEQ ID NO: 1154 - protein, 21 aa, Artificial Sequence
  Synthetic: Cathepsin S sensitive site
WQHDLFDSGFGGGAGVETGGK

SEQ ID NO: 1155 - protein, 18 aa, Artificial Sequence
  Synthetic: Cathepsin S sensitive site
DSVWGSGGGQQSVNHLVK

SEQ ID NO: 1156 - protein, 25 aa, Artificial Sequence
  Synthetic: Cathepsin S sensitive site
PEGPNEAEVTSGKPEQEVPDAEEEK

SEQ ID NO: 1157 - protein, 10 aa, Artificial Sequence
  Synthetic: Cathepsin S sensitive site
VQSGNINAAK

SEQ ID NO: 1158 - protein, 16 aa, Artificial Sequence
  Synthetic: Cathepsin S sensitive site
YQYGGLNSGRPVTPPR

SEQ ID NO: 1159 - protein, 26 aa, Artificial Sequence
  Synthetic: Cathepsin S sensitive site
VLQATVVAVGSGSKGKGGEIQPVSVK

SEQ ID NO: 1160 - protein, 17 aa, Artificial Sequence
  Synthetic: Cathepsin S sensitive site
GILFVGSGVSGGEEGAR

SEQ ID NO: 1161 - protein, 15 aa, Artificial Sequence
  Synthetic: Cathepsin S sensitive site
IEFLQSHENQEIYQK

SEQ ID NO: 1162 - protein, 19 aa, Artificial Sequence
  Synthetic: Cathepsin S sensitive site
LDEVITSHGAIEPDKDNVR

SEQ ID NO: 1163 - protein, 17 aa, Artificial Sequence
  Synthetic: Cathepsin S sensitive site
EHPVIESHPDNALEDLR

SEQ ID NO: 1164 - protein, 15 aa, Artificial Sequence
  Synthetic: Cathepsin S sensitive site
LIQSHPESAEDLQEK

SEQ ID NO: 1165 - protein, 13 aa, Artificial Sequence
  Synthetic: Cathepsin S sensitive site
TIVITSHPGQIVK

SEQ ID NO: 1166 - protein, 16 aa, Artificial Sequence
  Synthetic: Cathepsin S sensitive site
IEWLESHQDADIEDFK

SEQ ID NO: 1167 - protein, 17 aa, Artificial Sequence
  Synthetic: Cathepsin S sensitive site
GYPHLCSICDLPVHSNK

SEQ ID NO: 1168 - protein, 21 aa, Artificial Sequence
  Synthetic: Cathepsin S sensitive site
SEPCALCSLHSIGKIGGAQNR

SEQ ID NO: 1169 - protein, 13 aa, Artificial Sequence
  Synthetic: Cathepsin S sensitive site
LQSIGTENTEENR

SEQ ID NO: 1170 - protein, 14 aa, Artificial Sequence
  Synthetic: Cathepsin S sensitive site
LFIHESIHDEVVNR

SEQ ID NO: 1171 - protein, 24 aa, Artificial Sequence
  Synthetic: Cathepsin S sensitive site
VTFNINNSIPPTFDGEEEPSQGQK

SEQ ID NO: 1172 - protein, 23 aa, Artificial Sequence
  Synthetic: Cathepsin S sensitive site
NLNTLCWAIGSISGAMHEEDEKR

SEQ ID NO: 1173 - protein, 21 aa, Artificial Sequence
  Synthetic: Cathepsin S sensitive site
EASATNSPCTSKPATPAPSEK

SEQ ID NO: 1174 - protein, 18 aa, Artificial Sequence
  Synthetic: Cathepsin S sensitive site
PPNPNCYVCASKPEVTVR

SEQ ID NO: 1175 - protein, 10 aa, Artificial Sequence
  Synthetic: Cathepsin S sensitive site
ICSKPVVLPK

SEQ ID NO: 1176 - protein, 20 aa, Artificial Sequence
  Synthetic: Cathepsin S sensitive site
QFHFHWGSLDGQGSEHTVDK

SEQ ID NO: 1177 - protein, 21 aa, Artificial Sequence
  Synthetic: Cathepsin S sensitive site
QFHFHWGSLDGQGSEHTVDKK

SEQ ID NO: 1178 - protein, 20 aa, Artificial Sequence
  Synthetic: Cathepsin S sensitive site
GNPICSLHDQGAGGNGNVLK

SEQ ID NO: 1179 - protein, 16 aa, Artificial Sequence
  Synthetic: Cathepsin S sensitive site
EANFTVSSMHGDMPQK

SEQ ID NO: 1180 - protein, 15 aa, Artificial Sequence
  Synthetic: Cathepsin S sensitive site
NQLTSNPENTVFDAK

SEQ ID NO: 1181 - protein, 20 aa, Artificial Sequence
  Synthetic: Cathepsin S sensitive site
QVLVGSYCVFSNQGGLVHPK

SEQ ID NO: 1182 - protein, 12 aa, Artificial Sequence
  Synthetic: Cathepsin S sensitive site
DLQSNVEHLTEK

SEQ ID NO: 1183 - protein, 14 aa, Artificial Sequence
  Synthetic: Cathepsin S sensitive site
EEMQSNVEVVHTYR

SEQ ID NO: 1184 - protein, 23 aa, Artificial Sequence
  Synthetic: Cathepsin S sensitive site
APVQPQQSPAAAPGGTDEKPSGK

SEQ ID NO: 1185 - protein, 23 aa, Artificial Sequence
  Synthetic: Cathepsin S sensitive site
APVQPQQSPAAAPGGTDEKPSGK

SEQ ID NO: 1186 - protein, 22 aa, Artificial Sequence
  Synthetic: Cathepsin S sensitive site
NDGPVTIELESPAPGTATSDPK

SEQ ID NO: 1187 - protein, 20 aa, Artificial Sequence
  Synthetic: Cathepsin S sensitive site
INSLFLTDLYSPEYPGPSHR

SEQ ID NO: 1188 - protein, 23 aa, Artificial Sequence
  Synthetic: Cathepsin S sensitive site
NGSLDSPGKQDTEEDEEEDEKDK

SEQ ID NO: 1189 - protein, 24 aa, Artificial Sequence
  Synthetic: Cathepsin S sensitive site
SAAAASAASGSPGPGEGSAGGEKR

SEQ ID NO: 1190 - protein, 24 aa, Artificial Sequence
  Synthetic: Cathepsin S sensitive site
SAAAASAASGSPGPGEGSAGGEKR

SEQ ID NO: 1191 - protein, 21 aa, Artificial Sequence
  Synthetic: Cathepsin S sensitive site
NADTDLVSWLSPHDPNSVVTK

SEQ ID NO: 1192 - protein, 17 aa, Artificial Sequence
  Synthetic: Cathepsin S sensitive site
LSPPYSSPQEFAQDVGR

SEQ ID NO: 1193 - protein, 18 aa, Artificial Sequence
  Synthetic: Cathepsin S sensitive site
IIAFVGSPVEDNEKDLVK

SEQ ID NO: 1194 - protein, 14 aa, Artificial Sequence
  Synthetic: Cathepsin S sensitive site
MESQEPTESSQNGK

SEQ ID NO: 1195 - protein, 12 aa, Artificial Sequence
  Synthetic: Cathepsin S sensitive site
  misc_feature (2)..(2): Xaa can be any naturally occurring amino acid
AXASQLDCNFLK

SEQ ID NO: 1196 - protein, 18 aa, Artificial Sequence
  Synthetic: Cathepsin S sensitive site
SQGDSISSQLGPIHPPPR

SEQ ID NO: 1197 - protein, 20 aa, Artificial Sequence
  Synthetic: Cathepsin S sensitive site
LGGLLKPTVASQNQNLPVAK

SEQ ID NO: 1198 - protein, 30 aa, Artificial Sequence
  Synthetic: Cathepsin S sensitive site
SSWGMMGMLASQQNQSGPSGNNQNQGNMQR

SEQ ID NO: 1199 - protein, 15 aa, Artificial Sequence
  Synthetic: Cathepsin S sensitive site
DEYLINSQTTEHIVK

SEQ ID NO: 1200 - protein, 22 aa, Artificial Sequence
  Synthetic: Cathepsin S sensitive site
YQLGLAYGYNSQYDEAVAQFSK

SEQ ID NO: 1201 - protein, 19 aa, Artificial Sequence
  Synthetic: Cathepsin S sensitive site
GLLLLSVVVTSRPEAFQPH

SEQ ID NO: 1202 - protein, 16 aa, Artificial Sequence
  Synthetic: Cathepsin S sensitive site
RPASVSSSAAVEHEQR

SEQ ID NO: 1203 - protein, 19 aa, Artificial Sequence
  Synthetic: Cathepsin S sensitive site
FGIVTSSAGTGTTEDTEAK

SEQ ID NO: 1204 - protein, 20 aa, Artificial Sequence
  Synthetic: Cathepsin S sensitive site
FGIVTSSAGTGTTEDTEAKK

SEQ ID NO: 1205 - protein, 23 aa, Artificial Sequence
  Synthetic: Cathepsin S sensitive site
STASAPAAVNSSASADKPLSNMK

SEQ ID NO: 1206 - protein, 16 aa, Artificial Sequence
  Synthetic: Cathepsin S sensitive site
EALLSSAVDHGSDEVK

SEQ ID NO: 1207 - protein, 17 aa, Artificial Sequence
  Synthetic: Cathepsin S sensitive site
VSWLEYESSFSNEEAQK

SEQ ID NO: 1208 - protein, 20 aa, Artificial Sequence
  Synthetic: Cathepsin S sensitive site
  misc_feature (2)..(3): Xaa can be any naturally occurring amino acid
IXXGSSGAQGSGGGSTSAHY

SEQ ID NO: 1209 - protein, 21 aa, Artificial Sequence
  Synthetic: Cathepsin S sensitive site
HIGGPPGFASSSGKPGPTVIK

SEQ ID NO: 1210 - protein, 22 aa, Artificial Sequence
  Synthetic: Cathepsin S sensitive site
FEMYEPSELESSHLTDQDNEIR

SEQ ID NO: 1211 - protein, 21 aa, Artificial Sequence
  Synthetic: Cathepsin S sensitive site
SPDDDLGSSNWEAADLGNEER

SEQ ID NO: 1212 - protein, 28 aa, Artificial Sequence
  Synthetic: Cathepsin S sensitive site
GDSQVSSNPTSSPPGEAPAPVSVDSEPS

SEQ ID NO: 1213 - protein, 18 aa, Artificial Sequence
  Synthetic: Cathepsin S sensitive site
FVNGQPRPLESSQVKYLR

SEQ ID NO: 1214 - protein, 18 aa, Artificial Sequence
  Synthetic: Cathepsin S sensitive site
KPLTSSSAAPQRPISTQR

SEQ ID NO: 1215 - protein, 22 aa, Artificial Sequence
  Synthetic: Cathepsin S sensitive site
IHIGGPPGFASSSGKPGPTVIK

SEQ ID NO: 1216 - protein, 19 aa, Artificial Sequence
  Synthetic: Cathepsin S sensitive site
ELVSSSSSGSDSDSEVDKK

SEQ ID NO: 1217 - protein, 12 aa, Artificial Sequence
  Synthetic: Cathepsin S sensitive site
LLDSSTVTHLFK

SEQ ID NO: 1218 - protein, 23 aa, Artificial Sequence
  Synthetic: Cathepsin S sensitive site
PPPAAPPPSSSSVPEAGGPPIKK

SEQ ID NO: 1219 - protein, 20 aa, Artificial Sequence
  Synthetic: Cathepsin S sensitive site
YVELFLNSTAGASGGAYEHR

SEQ ID NO: 1220 - protein, 22 aa, Artificial Sequence
  Synthetic: Cathepsin S sensitive site
SHELSDFGLESTAGEIPVVAIR

SEQ ID NO: 1221 - protein, 22 aa, Artificial Sequence
  Synthetic: Cathepsin S sensitive site
ECEEEAINIQSTAPEEEHESPR

SEQ ID NO: 1222 - protein, 19 aa, Artificial Sequence
  Synthetic: Cathepsin S sensitive site
EGTGSTATSSSSTAGAAGK

SEQ ID NO: 1223 - protein, 18 aa, Artificial Sequence
  Synthetic: Cathepsin S sensitive site
PLHSIISSTESVQGSTSK

SEQ ID NO: 1224 - protein, 15 aa, Artificial Sequence
  Synthetic: Cathepsin S sensitive site
VAFTGSTEVGHLIQK

SEQ ID NO: 1225 - protein, 20 aa, Artificial Sequence
  Synthetic: Cathepsin S sensitive site
LALVTGGEIASTFDHPELVK

SEQ ID NO: 1226 - protein, 17 aa, Artificial Sequence
  Synthetic: Cathepsin S sensitive site
ATIELCSTHANDASALR

SEQ ID NO: 1227 - protein, 16 aa, Artificial Sequence
  Synthetic: Cathepsin S sensitive site
VHITLSTHECAGLSER

SEQ ID NO: 1228 - protein, 18 aa, Artificial Sequence
  Synthetic: Cathepsin S sensitive site
EEEEPQAPQESTPAPPKK

SEQ ID NO: 1229 - protein, 16 aa, Artificial Sequence
  Synthetic: Cathepsin S sensitive site
SITILSTPEGTSAACK

SEQ ID NO: 1230 - protein, 19 aa, Artificial Sequence
  Synthetic: Cathepsin S sensitive site
ETLASSDSFASTQPTHSWK

SEQ ID NO: 1231 - protein, 16 aa, Artificial Sequence
  Synthetic: Cathepsin S sensitive site
VVVLMGSTSDLGHCEK

SEQ ID NO: 1232 - protein, 24 aa, Artificial Sequence
  Synthetic: Cathepsin S sensitive site
VLLSNLSSTSHVPEVDPGSAELQK

SEQ ID NO: 1233 - protein, 11 aa, Artificial Sequence
  Synthetic: Cathepsin S sensitive site
LFDSTTLEHQK

SEQ ID NO: 1234 - protein, 16 aa, Artificial Sequence
  Synthetic: Cathepsin S sensitive site
TQLEGLQSTVTGHVER

SEQ ID NO: 1235 - protein, 21 aa, Artificial Sequence
  Synthetic: Cathepsin S sensitive site
GSESGGSAVDSVAGEHSVSGR

SEQ ID NO: 1236 - protein, 15 aa, Artificial Sequence
  Synthetic: Cathepsin S sensitive site
YEILQSVDDAAIVIK

SEQ ID NO: 1237 - protein, 19 aa, Artificial Sequence
  Synthetic: Cathepsin S sensitive site
NDLSICGTLHSVDQYLNIK

SEQ ID NO: 1238 - protein, 13 aa, Artificial Sequence
  Synthetic: Cathepsin S sensitive site
ILDSVGIEADDDR

SEQ ID NO: 1239 - protein, 16 aa, Artificial Sequence
  Synthetic: Cathepsin S sensitive site
ILDSVGIEADDDRLNK

SEQ ID NO: 1240 - protein, 16 aa, Artificial Sequence
  Synthetic: Cathepsin S sensitive site
IYVASVHQDLSDDDIK

SEQ ID NO: 1241 - protein, 12 aa, Artificial Sequence
  Synthetic: Cathepsin S sensitive site
ELQSVKPQEAPK

SEQ ID NO: 1242 - protein, 18 aa, Artificial Sequence
  Synthetic: Cathepsin S sensitive site
HYTEGAELVDSVLDVVRK

SEQ ID NO: 1243 - protein, 19 aa, Artificial Sequence
  Synthetic: Cathepsin S sensitive site
LAEGSVTSVGSVNPAENFR

SEQ ID NO: 1244 - protein, 19 aa, Artificial Sequence
  Synthetic: Cathepsin S sensitive site
GSPTSLGTWGSWIGPDHDK

SEQ ID NO: 1245 - protein, 14 aa, Artificial Sequence
  Synthetic: Cathepsin S sensitive site
VLNSYWVGEDSTYK

SEQ ID NO: 1246 - protein, 11 aa, Artificial Sequence
  Synthetic: Cathepsin S sensitive site
SLGTADVHFER

SEQ ID NO: 1247 - protein, 12 aa, Artificial Sequence
  Synthetic: Cathepsin S sensitive site
MAGTAFDFENMK

SEQ ID NO: 1248 - protein, 13 aa, Artificial Sequence
  Synthetic: Cathepsin S sensitive site
VLATAFDTTLGGR

SEQ ID NO: 1249 - protein, 19 aa, Artificial Sequence
  Synthetic: Cathepsin S sensitive site
VELFLNSTAGASGGAYEHR

SEQ ID NO: 1250 - protein, 20 aa, Artificial Sequence
  Synthetic: Cathepsin S sensitive site
APPPSGSAVSTAPQQKPIGK

SEQ ID NO: 1251 - protein, 17 aa, Artificial Sequence
  Synthetic: Cathepsin S sensitive site
SQIFSTASDNQPTVTIK

SEQ ID NO: 1252 - protein, 14 aa, Artificial Sequence
  Synthetic: Cathepsin S sensitive site
IYWGTATTGKPHVA

SEQ ID NO: 1253 - protein, 14 aa, Artificial Sequence
  Synthetic: Cathepsin S sensitive site
MMLGTEGGEGFVVK

SEQ ID NO: 1254 - protein, 17 aa, Artificial Sequence
  Synthetic: Cathepsin S sensitive site
FGAVWTGDNTAEWDHLK

SEQ ID NO: 1255 - protein, 15 aa, Artificial Sequence
  Synthetic: Cathepsin S sensitive site
VSHVSTGGGASLELL

SEQ ID NO: 1256 - protein, 16 aa, Artificial Sequence
  Synthetic: Cathepsin S sensitive site
VSHVSTGGGASLELLE

SEQ ID NO: 1257 - protein, 18 aa, Artificial Sequence
  Synthetic: Cathepsin S sensitive site
VSHVSTGGGASLELLEGK

SEQ ID NO: 1258 - protein, 21 aa, Artificial Sequence
  Synthetic: Cathepsin S sensitive site
ILISLATGHREEGGENLDQAR

SEQ ID NO: 1259 - protein, 19 aa, Artificial Sequence
  Synthetic: Cathepsin S sensitive site
TLDQCIQTGVDNPGHPFIK

SEQ ID NO: 1260 - protein, 20 aa, Artificial Sequence
  Synthetic: Cathepsin S sensitive site
SGFTLDDVIQTGVDNPGHPY

SEQ ID NO: 1261 - protein, 14 aa, Artificial Sequence
  Synthetic: Cathepsin S sensitive site
DLTTGYDDSQPDKK

SEQ ID NO: 1262 - protein, 14 aa, Artificial Sequence
  Synthetic: Cathepsin S sensitive site
FFFGTHETAFLGPK

SEQ ID NO: 1263 - protein, 14 aa, Artificial Sequence
  Synthetic: Cathepsin S sensitive site
FPSLLTHNENMVAK

SEQ ID NO: 1264 - protein, 17 aa, Artificial Sequence
  Synthetic: Cathepsin S sensitive site
YEDICPSTHNMDVPNIK

SEQ ID NO: 1265 - protein, 24 aa, Artificial Sequence
  Synthetic: Cathepsin S sensitive site
DYALHWLVLGTHTSDEQNHLVVAR

SEQ ID NO: 1266 - protein, 10 aa, Artificial Sequence
  Synthetic: Cathepsin S sensitive site
FGTINIVHPK

SEQ ID NO: 1267 - protein, 18 aa, Artificial Sequence
  Synthetic: Cathepsin S sensitive site
SMVNTKPEKTEEDSEEVR

SEQ ID NO: 1268 - protein, 29 aa, Artificial Sequence
  Synthetic: Cathepsin S sensitive site
VTLLTPAGATGSGGGTSGDSSKGEDKQDR

SEQ ID NO: 1269 - protein, 23 aa, Artificial Sequence
  Synthetic: Cathepsin S sensitive site
PGETLTEILETPATSEQEAEHQR

SEQ ID NO: 1270 - protein, 18 aa, Artificial Sequence
  Synthetic: Cathepsin S sensitive site
NSVQTPVENSTNSQHQVK

SEQ ID NO: 1271 - protein, 16 aa, Artificial Sequence
  Synthetic: Cathepsin S sensitive site
  misc_feature (2)..(3): Xaa can be any naturally occurring amino acid
AXXITPVPGGVGPMTV

SEQ ID NO: 1272 - protein, 21 aa, Artificial Sequence
  Synthetic: Cathepsin S sensitive site
STVLTPMFVETQASQGTLQTR

SEQ ID NO: 1273 - protein, 15 aa, Artificial Sequence
  Synthetic: Cathepsin S sensitive site
TFTTQETITNAETAK

SEQ ID NO: 1274 - protein, 14 aa, Artificial Sequence
  Synthetic: Cathepsin S sensitive site
SPVSTRPLPSASQK

SEQ ID NO: 1275 - protein, 19 aa, Artificial Sequence
  Synthetic: Cathepsin S sensitive site
TNEQWQMSLGTSEDHQHFT

SEQ ID NO: 1276 - protein, 18 aa, Artificial Sequence
  Synthetic: Cathepsin S sensitive site
  misc_feature (5)..(5): Xaa can be any naturally occurring amino acid
QEIIXQLDVTTSEYEKEK

SEQ ID NO: 1277 - protein, 24 aa, Artificial Sequence
  Synthetic: Cathepsin S sensitive site
LLAFLLAELGTSGSIDGNNQLVIK

SEQ ID NO: 1278 - protein, 17 aa, Artificial Sequence
  Synthetic: Cathepsin S sensitive site
  misc_feature (2)..(2): Xaa can be any naturally occurring amino acid
LXNMEIGTSLFDEEGAK

SEQ ID NO: 1279 - protein, 25 aa, Artificial Sequence
  Synthetic: Cathepsin S sensitive site
AEKPAETPVATSPTATDSTSGDSSR

SEQ ID NO: 1280 - protein, 16 aa, Artificial Sequence
  Synthetic: Cathepsin S sensitive site
LLETTDRPDGHQNNLR

SEQ ID NO: 1281 - protein, 19 aa, Artificial Sequence
  Synthetic: Cathepsin S sensitive site
  misc_feature (8)..(9): Xaa can be any naturally occurring amino acid
AQTITSEXXSTTTTTHITK

SEQ ID NO: 1282 - protein, 16 aa, Artificial Sequence
  Synthetic: Cathepsin S sensitive site
ADAVGMSTVPEVIVAR

SEQ ID NO: 1283 - protein, 16 aa, Artificial Sequence
  Synthetic: Cathepsin S sensitive site
IHFPLATYAPVISAEK

SEQ ID NO: 1284 - protein, 16 aa, Artificial Sequence
  Synthetic: Cathepsin S sensitive site
  misc_feature (3)..(3): Xaa can be any naturally occurring amino acid
  misc_feature (5)..(6): Xaa can be any naturally occurring amino acid
DTXVXXDTYNCDLHFK

SEQ ID NO: 1285 - protein, 14 aa, Artificial Sequence
  Synthetic: Cathepsin S sensitive site
VVIGMDVAASEFFR

SEQ ID NO: 1286 - protein, 20 aa, Artificial Sequence
  Synthetic: Cathepsin S sensitive site
  misc_feature (2)..(6): Xaa can be any naturally occurring amino acid
  misc_feature (10)..(10): Xaa can be any naturally occurring amino acid
GXXXXXIGLXVADLAESIMK

SEQ ID NO: 1287 - protein, 13 aa, Artificial Sequence
  Synthetic: Cathepsin S sensitive site
ANPQVGVAFPHIK

SEQ ID NO: 1288 - protein, 23 aa, Artificial Sequence
  Synthetic: Cathepsin S sensitive site
PQEAKPQEAAVAPEKPPASDETK

SEQ ID NO: 1289 - protein, 11 aa, Artificial Sequence
  Synthetic: Cathepsin S sensitive site
HFSVEGQLEFR

SEQ ID NO: 1290 - protein, 14 aa, Artificial Sequence
  Synthetic: Cathepsin S sensitive site
VATLGVEVHPLVFH

SEQ ID NO: 1291 - protein, 14 aa, Artificial Sequence
  Synthetic: Cathepsin S sensitive site
HWPFQVINDGDKPK

SEQ ID NO: 1292 - protein, 18 aa, Artificial Sequence
  Synthetic: Cathepsin S sensitive site
LPVPAFNVINGGSHAGNK

SEQ ID NO: 1293 - protein, 21 aa, Artificial Sequence
  Synthetic: Cathepsin S sensitive site
EVANGIESLGVKPDLPPPPSK

SEQ ID NO: 1294 - protein, 19 aa, Artificial Sequence
  Synthetic: Cathepsin S sensitive site
TYYDVLGVKPNATQEELKK

SEQ ID NO: 1295 - protein, 18 aa, Artificial Sequence
  Synthetic: Cathepsin S sensitive site
ETVAVKPTENNEEEFTSK

SEQ ID NO: 1296 - protein, 13 aa, Artificial Sequence
  Synthetic: Cathepsin S sensitive site
SLLVNPEGPTLMR

SEQ ID NO: 1297 - protein, 16 aa, Artificial Sequence
  Synthetic: Cathepsin S sensitive site
NWMNSLGVNPHVNHLY

SEQ ID NO: 1298 - protein, 18 aa, Artificial Sequence
  Synthetic: Cathepsin S sensitive site
HGLLVPNNTTDQELQHIR

SEQ ID NO: 1299 - protein, 18 aa, Artificial Sequence
  Synthetic: Cathepsin S sensitive site
QELEFLEVQEEYIKDEQK

SEQ ID NO: 1300 - protein, 20 aa, Artificial Sequence
  Synthetic: Cathepsin S sensitive site
LEGTLLKPNMVTPGHACTQK

SEQ ID NO: 1301 - protein, 11 aa, Artificial Sequence
  Synthetic: Cathepsin S sensitive site
FVNVVPTFGKK

SEQ ID NO: 1302 - protein, 16 aa, Artificial Sequence
  Synthetic: Cathepsin S sensitive site
EDLVFIFWAPESAPLK

SEQ ID NO: 1303 - protein, 19 aa, Artificial Sequence
  Synthetic: Cathepsin S sensitive site
AIYIDASCLTWEGQQFQGK

SEQ ID NO: 1304 - protein, 21 aa, Artificial Sequence
  Synthetic: Cathepsin S sensitive site
EQPQHPLHVTYAGAAVDELGK

SEQ ID NO: 1305 - protein, 18 aa, Artificial Sequence
  Synthetic: Cathepsin S sensitive site
SPDGHLFQVEYAQEAVKK

SEQ ID NO: 1306 - protein, 8 aa, Artificial Sequence
  Synthetic: Cathepsin S sensitive site
NYKPPAQK

SEQ ID NO: 1307 - protein, 11 aa, Artificial Sequence
  Synthetic: Cathepsin S sensitive site
VYNYNHLMPTR

SEQ ID NO: 1308 - protein, 15 aa, Artificial Sequence
  Synthetic: Cathepsin S sensitive site
LAEAELEYNPEHVSR

SEQ ID NO: 1309 - protein, 13 aa, Artificial Sequence
  Synthetic: Cathepsin S sensitive site
MPYQYPALTPEQK

SEQ ID NO: 1310 - protein, 18 aa, Artificial Sequence
  Synthetic: Cathepsin S sensitive site
TSSANNPNLMYQDECDRR

SEQ ID NO: 1311 - protein, 18 aa, Artificial Sequence
  Synthetic: Cathepsin S sensitive site
VGINYQPPTVVPGGDLAK

SEQ ID NO: 1312 - protein, 15 aa, Artificial Sequence
  Synthetic: Cathepsin S sensitive site
  misc_feature (6)..(6): Xaa can be any naturally occurring amino acid
YMACCXLYRGDVVPK

SEQ ID NO: 1313 - protein, 11 aa, Artificial Sequence
  Synthetic: Cathepsin S sensitive site
SYCYVSKEELK

SEQ ID NO: 1314 - DNA, 42 bp, Artificial Sequence
  Synthetic: (sec sense primer)
aagcttagcggccgcaccatgcgggtcacggcgccccgaacc

SEQ ID NO: 1315 - DNA, 30 bp, Artificial Sequence
  Synthetic: (sec antisense primer)
ctgcagggagccggcccaggtctcggtcag

SEQ ID NO: 1316 - DNA, 33 bp, Artificial Sequence
  Synthetic: (MITD sense primer)
ggatccatcgtgggcattgttgctggcctggct

SEQ ID NO: 1317 - DNA, 42 bp, Artificial Sequence
  Synthetic: (MITD antisense primer)
gaattcagtctcgagtcaagctgtgagagacacatcagagcc

SEQ ID NO: 1318 - protein, 76 aa, Artificial Sequence [sequence omitted]

SEQ ID NO: 1319 - RNA, 1429 nt, Artificial Sequence
  Synthetic: (STING mRNA sequence; CX-012871)
  misc_feature: 5'7MeGpppG2Ome
  misc_feature: OH 3'
ggaaauaagagagaaaagaagaguaagaagaaauauaagagccaccaugccccacaguagccuccaccccagcauccccugccccagaggccacggcgcacagaaggccgcccuggugcugcugagcgccugucuggugacccuguggggucugggcgagccccccgagcacacccugcgguaccucgugcugcaucuggccagccugcagcugggccugcugcugaacggcgugugcagccuggccgaagagcugagacacauccacagcagauacagaggcuccuacuggagaaccgucagagccugccucggcuguccccugagaagaggcgcccugcugcuccugagcaucuacuucuacuacagccugcccaacgccgugggcccccccuucaccuggaugcuggcccugcugggccugagccaggcccugaacauccugcugggccugaagggcuuggcccccgccgagaucuccgccgugugcgagaagggcaacuucaacauggcccauggccuugccugguccuacuacaucggcuaccugagacugauccugcccgagcugcaggccagaaucagaaccuacaaccagcacuacaacaaccugcugagaggcgccgugagccaaagacuguacauccugcugccccuggacugcggcgugcccgacaaccuuagcauggccgaccccaacaucagauuccuggacaagcugccccagcagaccggcgaccacgccggcaucaaggacagaguguacagcaacagcaucuacgagcugcuggagaacggccagagagccggcaccugcgugcuggaguacgccaccccccugcagacccuguucgccaugagccaguacagccaggccggcuucagcagagaggacagacuggagcaagccaagcuguucugcagaacccuggaggacauccuggcggacgcccccgagagccaaaacaacugcagacugaucgccuaccaggagcccgccgacgacagcagcuucagccugagccaggaagugcugagacaccugagacaggaagagaaggaggaggugaccgugggaagccugaagaccagcgccgugcccagcaccagcaccaugagccaggagcccgagcugcugaucagcggcauggagaagccccugccccugagaaccgacuucagcugauaauaggcuggagccucgguggccuagcuucuugccccuugggccuccccccagccccuccuccccuuccugcacccguaccccccaaacaccauugucacacuccaguggucuuugaauaaagucugagugggcggcaaaaaaaaaaaaaaaaaaaaaaaaaaaaaaaaaaaaaaaaaaaaaaaaaaaaaaaaaaaaaaaaaaaaaaaaaaaaaaaaaaaaaaaaaaaaaaaaaaaaucuag

SEQ ID NO: 1320 - RNA, 1137 nt, Artificial Sequence
  Synthetic: (huSTING(V155M); no epitope tag; nucleotide sequence)
augccccacaguagccuccaccccagcauccccugccccagaggccacggcgcacagaaggccgcccuggugcugcugagcgccugucuggugacccuguggggucugggcgagccccccgagcacacccugcgguaccucgugcugcaucuggccagccugcagcugggccugcugcugaacggcgugugcagccuggccgaagagcugagacacauccacagcagauacagaggcuccuacuggagaaccgucagagccugccucggcuguccccugagaagaggcgcccugcugcuccugagcaucuacuucuacuacagccugcccaacgccgugggcccccccuucaccuggaugcuggcccugcugggccugagccaggcccugaacauccugcugggccugaagggcuuggcccccgccgagaucuccgccgugugcgagaagggcaacuucaacauggcccauggccuugccugguccuacuacaucggcuaccugagacugauccugcccgagcugcaggccagaaucagaaccuacaaccagcacuacaacaaccugcugagaggcgccgugagccaaagacuguacauccugcugccccuggacugcggcgugcccgacaaccuuagcauggccgaccccaacaucagauuccuggacaagcugccccagcagaccggcgaccacgccggcaucaaggacagaguguacagcaacagcaucuacgagcugcuggagaacggccagagagccggcaccugcgugcuggaguacgccaccccccugcagacccuguucgccaugagccaguacagccaggccggcuucagcagagaggacagacuggagcaagccaagcuguucugcagaacccuggaggacauccuggcggacgcccccgagagccaaaacaacugcagacugaucgccuaccaggagcccgccgacgacagcagcuucagccugagccaggaagugcugagacaccugagacaggaagagaaggaggaggugaccgugggaagccugaagaccagcgccgugcccagcaccagcaccaugagccaggagcccgagcugcugaucagcggcauggagaagccccugccccugagaaccgacuucagc

SEQ ID NO: 1321 - RNA, 570 nt, Artificial Sequence
  Synthetic: (KRAS concatemer mRNA sequence; CX-012908)
  misc_feature: 5'7MeGpppG2Ome
  misc_feature: OH 3'
ggaaauaagagagaaaagaagaguaagaagaaauauaagagccaccaugaccgaguacaagcucguggucgucggcgccgacgggguaggcaaguccgcucugaccauucagcucauccagaugacggaguacaaacucgugguagugggagccgugggugugggcaagagcgcgcucaccauccaacucauccaaaugaccgaauauaaacucgucguggugggagccggcgacgugggaaagagcgcccuuaccauccaguuaauccagaugacagaauacaagcuggugguggucggugccugcggcguggguaaguccgcccugacaauccagcugauccagugauaauaggcuggagccucgguggccaugcuucuugccccuugggccuccccccagccccuccuccccuuccugcacccguacccccguggucuuugaauaaagucugagugggcggcaaaaaaaaaaaaaaaaaaaaaaaaaaaaaaaaaaaaaaaaaaaaaaaaaaaaaaaaaaaaaaaaaaaaaaaaaaaaaaaaaaaaaaaaaaaaaaaaaaaaucuag

SEQ ID NO: 1322 - RNA, 300 nt, Artificial Sequence
  Synthetic: (KRAS(G12D G12V G13D G12C) 100mer 4MUT nt. seq)
augaccgaguacaagcucguggucgucggcgccgacgggguaggcaaguccgcucugaccauucagcucauccagaugacggaguacaaacucgugguagugggagccgugggugugggcaagagcgcgcucaccauccaacucauccaaaugaccgaauauaaacucgucguggugggagccggcgacgugggaaagagcgcccuuaccauccaguuaauccagaugacagaauacaagcuggugguggucggugccugcggcguggguaaguccgcccugacaauccagcugauccag

SEQ ID NO: 1323 - RNA, 46 nt, Artificial Sequence
  Synthetic: (5 UTR)
ggaaauaagagagaaaagaagaguaagaagaaauauaagagccacc

SEQ ID NO: 1324 - RNA, 85 nt, Artificial Sequence
  Synthetic: (miR-122)
ccuuagcagagcuguggagugugacaaugguguuugugucuaaacuaucaaacgccauuaucacacuaaauagcuacugcuaggc

SEQ ID NO: 1325 - RNA, 22 nt, Artificial Sequence
  Synthetic: (miR-122-3p binding site)
uauuuagugugauaauggcguu

SEQ ID NO: 1326 - RNA, 22 nt, Artificial Sequence
  Synthetic: (miR-122-5p binding site)
caaacaccauugucacacucca

SEQ ID NO: 1327 - protein, 179 aa, Artificial Sequence
  Synthetic: (human MLKL(1-180) ORF amino acid sequence; no epitope tag)
MENLKHIITLGQVIHKRCEEMKYCKKQCRRLGHRVLGLIKPLEMLQDQGKRSVPSEKLTTAMNRFKAALEEANGEIEKFSNRSNICRFLTASQDKILFKDVNRKLSDVWKELSLLLQVEQRMPVSPISQGASWAQEDQQDADEDRRAFQMLRRDNEKIEASLRRLEINMKEIKETLRQY

SEQ ID NO: 1328 - protein, 180 aa, Artificial Sequence
  Synthetic: (mouse MLKL(1-180) ORF amino acid sequence; no epitope tag)
MDKLGQIIKLGQLIYEQCEKMKYCRKQCQRLGNRVHGLLQPLQRLQAQGKKNLPDDITAALGRFDEVLKEANQQIEKFSKKSHIWKFVSVGNDKILFHEVNEKLRDVWEELLLLLQVYHWNTVSDVSQPASWQQEDRQDAEEDGNENMKVILMQLQISVEEINKTLKQCSLKPTQEIPQD

SEQ ID NO: 1329 - protein, 658 aa, Artificial Sequence
  Synthetic: (muRIPK3?C-2xFV; TH1001 with no epitope tag)
MSSVKLWPTGASAVPLVSREELKKLEFVGKGGFGVVFRAHHRTWNHDVAVKIVNSKKISWEVKAMVNLRNENVLLLLGVTEDLQWDFVSGQALVTRFMENGSLAGLLQPECPRPWPLLCRLLQEVVLGMCYLHSLNPPLLHRDLKPSNILLDPELHAKLADFGLSTFQGGSQSGSGSGSGSRDSGGTLAYLDPELLFDVNLKASKASDVYSFGILVWAVLAGREAELVDKTSLIRETVCDRQSRPPLTELPPGSPETPGLEKLKELMIHCWGSQSENRPSFQDCEPKTNEVYNLVKDKVDAAVSEVKHYLSQHRSSGRNLSAREPSQRGTEMDCPRETMVSKMLDRLHLEEPSGPVPGKCPERQAQDTSVGPATPARTSSDPVAGTPQIPHTLPFRGTTPGPVFTETPGPHPQRNQGDGRHGTPWYPWTPPNPMTGPPALVFNNGVQVETISPGDGRTFPKRGQTCVVHYTGMLEDGKKVDSSRDRNKPFKFMLGKQEVIRGWEEGVAQMSVGQRAKLTISPDYAYGATGHPGIIPPHATLVFDVELLKLEGVQVETISPGDGRTFPKRGQTCVVHYTGMLEDGKKVDSSRDRNKPFKFMLGKQEVIRGWEEGVAQMSVGQRAKLTISPDYAYGATGHPGIIPPHATLVFDVELLKLE

SEQ ID NO: 1330 - protein, 556 aa, Artificial Sequence
  Synthetic: (muRIPK3?C-2xSGTA.DM; TH1003 with no epitope tag)
MSSVKLWPTGASAVPLVSREELKKLEFVGKGGFGVVFRAHHRTWNHDVAVKIVNSKKISWEVKAMVNLRNENVLLLLGVTEDLQWDFVSGQALVTRFMENGSLAGLLQPECPRPWPLLCRLLQEVVLGMCYLHSLNPPLLHRDLKPSNILLDPELHAKLADFGLSTFQGGSQSGSGSGSGSRDSGGTLAYLDPELLFDVNLKASKASDVYSFGILVWAVLAGREAELVDKTSLIRETVCDRQSRPPLTELPPGSPETPGLEKLKELMIHCWGSQSENRPSFQDCEPKTNEVYNLVKDKVDAAVSEVKHYLSQHRSSGRNLSAREPSQRGTEMDCPRETMVSKMLDRLHLEEPSGPVPGKCPERQAQDTSVGPATPARTSSDPVAGTPQIPHTLPFRGTTPGPVFTETPGPHPQRNQGDGRHGTPWYPWTPPNPMTGPPALVFNNGGGGSGGGGSKKRLAYAIIQFLHDQLRHGGLSSDAQESLEVAIQCLETAFGVTVEDSDLALKKRLAYAIIQFLHDQLRHGGLSSDAQESLEVAIQCLETAFGVTVEDSDLAL

SEQ ID NO: 1331 - protein, 536 aa, Artificial Sequence
  Synthetic: (muRIPK3?C-2xSrc.DM; TH1005 no epitope tag)
MSSVKLWPTGASAVPLVSREELKKLEFVGKGGFGVVFRAHHRTWNHDVAVKIVNSKKISWEVKAMVNLRNENVLLLLGVTEDLQWDFVSGQALVTRFMENGSLAGLLQPECPRPWPLLCRLLQEVVLGMCYLHSLNPPLLHRDLKPSNILLDPELHAKLADFGLSTFQGGSQSGSGSGSGSRDSGGTLAYLDPELLFDVNLKASKASDVYSFGILVWAVLAGREAELVDKTSLIRETVCDRQSRPPLTELPPGSPETPGLEKLKELMIHCWGSQSENRPSFQDCEPKTNEVYNLVKDKVDAAVSEVKHYLSQHRSSGRNLSAREPSQRGTEMDCPRETMVSKMLDRLHLEEPSGPVPGKCPERQAQDTSVGPATPARTSSDPVAGTPQIPHTLPFRGTTPGPVFTETPGPHPQRNQGDGRHGTPWYPWTPPNPMTGPPALVFNNGGGGSGGGGSGAMEPENKYLPELMAEKDSLDPSFTHAMQLLTAEIEKIQKGGAMEPENKYLPELMAEKDSLDPSFTHAMQLLTAEIEKIQKG

SEQ ID NO: 1332 - protein, 671 aa, Artificial Sequence
  Synthetic: (huRIPK3.del.C-2xFv; TH1007 with no epitope tag)
MSCVKLWPSGAPAPLVSIEELENQELVGKGGFGTVFRAQHRKWGYDVAVKIVNSKAISREVKAMASLDNEFVLRLEGVIEKVNWDQDPKPALVTKFMENGSLSGLLQSQCPRPWPLLCRLLKEVVLGMFYLHDQNPVLLHRDLKPSNVLLDPELHVKLADFGLSTFQGGSQSGTGSGEPGGTLGYLAPELFVNVNRKASTASDVYSFGILMWAVLAGREVELPTEPSLVYEAVCNRQNRPSLAELPQAGPETPGLEGLKELMQLCWSSEPKDRPSFQECLPKTDEVFQMVENNMNAAVSTVKDFLSQLRSSNRRFSIPESGQGGTEMDGFRRTIENQHSRNDVMVSEWLNKLNLEEPPSSVPKKCPSLTKRSRAQEEQVPQAWTAGTSSDSMAQPPQTPETSTFRNQMPSPTSTGTPSPGPRGNQGAERQGMNWSCRTPEPNPVTGRPLVNTFGVQVETISPGDGRTFPKRGQTCVVHYTGMLEDGKKVDSSRDRNKPFKFMLGKQEVIRGWEEGVAQMSVGQRAKLTISPDYAYGATGHPGIIPPHATLVFDVELLKLETRGVQVETISPGDGRTFPKRGQTCVVHYTGMLEDGKKVDSSRDRNKPFKFMLGKQEVIRGWEEGVAQMSVGQRAKLTISPDYAYGATGHPGIIPPHATLVFDVELLKLETS

SEQ ID NO: 1333 - protein, 453 aa, Artificial Sequence
  Synthetic: (huRIPK3.del.C; TH1008 with no epitope tag)
MSCVKLWPSGAPAPLVSIEELENQELVGKGGFGTVFRAQHRKWGYDVAVKIVNSKAISREVKAMASLDNEFVLRLEGVIEKVNWDQDPKPALVTKFMENGSLSGLLQSQCPRPWPLLCRLLKEVVLGMFYLHDQNPVLLHRDLKPSNVLLDPELHVKLADFGLSTFQGGSQSGTGSGEPGGTLGYLAPELFVNVNRKASTASDVYSFGILMWAVLAGREVELPTEPSLVYEAVCNRQNRPSLAELPQAGPETPGLEGLKELMQLCWSSEPKDRPSFQECLPKTDEVFQMVENNMNAAVSTVKDFLSQLRSSNRRFSIPESGQGGTEMDGFRRTIENQHSRNDVMVSEWLNKLNLEEPPSSVPKKCPSLTKRSRAQEEQVPQAWTAGTSSDSMAQPPQTPETSTFRNQMPSPTSTGTPSPGPRGNQGAERQGMNWSCRTPEPNPVTGRPLVNTF

SEQ ID NO: 1334 - protein, 444 aa, Artificial Sequence
  Synthetic: (muRIPK3.del.C; TH1009 with no epitope tag)
MSSVKLWPTGASAVPLVSREELKKLEFVGKGGFGVVFRAHHRTWNHDVAVKIVNSKKISWEVKAMVNLRNENVLLLLGVTEDLQWDFVSGQALVTRFMENGSLAGLLQPECPRPWPLLCRLLQEVVLGMCYLHSLNPPLLHRDLKPSNILLDPELHAKLADFGLSTFQGGSQSGSGSGSGSRDSGGTLAYLDPELLFDVNLKASKASDVYSFGILVWAVLAGREAELVDKTSLIRETVCDRQSRPPLTELPPGSPETPGLEKLKELMIHCWGSQSENRPSFQDCEPKTNEVYNLVKDKVDAAVSEVKHYLSQHRSSGRNLSAREPSQRGTEMDCPRETMVSKMLDRLHLEEPSGPVPGKCPERQAQDTSVGPATPARTSSDPVAGTPQIPHTLPFRGTTPGPVFTETPGPHPQRNQGDGRHGTPWYPWTPPNPMTGPPALVFNN

SEQ ID NO: 1335 - protein, 598 aa, Artificial Sequence
  Synthetic: (muRIPK3-2xSGTA.DM; TH1010 with no epitope tag)
MSSVKLWPTGASAVPLVSREELKKLEFVGKGGFGVVFRAHHRTWNHDVAVKIVNSKKISWEVKAMVNLRNENVLLLLGVTEDLQWDFVSGQALVTRFMENGSLAGLLQPECPRPWPLLCRLLQEVVLGMCYLHSLNPPLLHRDLKPSNILLDPELHAKLADFGLSTFQGGSQSGSGSGSGSRDSGGTLAYLDPELLFDVNLKASKASDVYSFGILVWAVLAGREAELVDKTSLIRETVCDRQSRPPLTELPPGSPETPGLEKLKELMIHCWGSQSENRPSFQDCEPKTNEVYNLVKDKVDAAVSEVKHYLSQHRSSGRNLSAREPSQRGTEMDCPRETMVSKMLDRLHLEEPSGPVPGKCPERQAQDTSVGPATPARTSSDPVAGTPQIPHTLPFRGTTPGPVFTETPGPHPQRNQGDGRHGTPWYPWTPPNPMTGPPALVFNNCSEVQIGNYNSLVAPPRTTASSSAKYDQAQFGRGRGWQPFHKGGGGSGGGGSKKRLAYAIIQFLHDQLRHGGLSSDAQESLEVAIQCLETAFGVTVEDSDLALKKRLAYAIIQFLHDQLRHGGLSSDAQESLEVAIQCLETAFGVTVEDSDLAL

SEQ ID NO: 1336 - protein, 578 aa, Artificial Sequence
  Synthetic: (muRIPK3-2xSrc.DM; TH1011 with no epitope tag)
MSSVKLWPTGASAVPLVSREELKKLEFVGKGGFGVVFRAHHRTWNHDVAVKIVNSKKISWEVKAMVNLRNENVLLLLGVTEDLQWDFVSGQALVTRFMENGSLAGLLQPECPRPWPLLCRLLQEVVLGMCYLHSLNPPLLHRDLKPSNILLDPELHAKLADFGLSTFQGGSQSGSGSGSGSRDSGGTLAYLDPELLFDVNLKASKASDVYSFGILVWAVLAGREAELVDKTSLIRETVCDRQSRPPLTELPPGSPETPGLEKLKELMIHCWGSQSENRPSFQDCEPKTNEVYNLVKDKVDAAVSEVKHYLSQHRSSGRNLSAREPSQRGTEMDCPRETMVSKMLDRLHLEEPSGPVPGKCPERQAQDTSVGPATPARTSSDPVAGTPQIPHTLPFRGTTPGPVFTETPGPHPQRNQGDGRHGTPWYPWTPPNPMTGPPALVFNNCSEVQIGNYNSLVAPPRTTASSSAKYDQAQFGRGRGWQPFHKGGGGSGGGGSGAMEPENKYLPELMAEKDSLDPSFTHAMQLLTAEIEKIQKGGAMEPENKYLPELMAEKDSLDPSFTHAMQLLTAEIEKIQKG

SEQ ID NO: 1337 - protein, 700 aa, Artificial Sequence
  Synthetic: (muRIPK3-2xFV; TH1012 with no epitope tag)
MSSVKLWPTGASAVPLVSREELKKLEFVGKGGFGVVFRAHHRTWNHDVAVKIVNSKKISWEVKAMVNLRNENVLLLLGVTEDLQWDFVSGQALVTRFMENGSLAGLLQPECPRPWPLLCRLLQEVVLGMCYLHSLNPPLLHRDLKPSNILLDPELHAKLADFGLSTFQGGSQSGSGSGSGSRDSGGTLAYLDPELLFDVNLKASKASDVYSFGILVWAVLAGREAELVDKTSLIRETVCDRQSRPPLTELPPGSPETPGLEKLKELMIHCWGSQSENRPSFQDCEPKTNEVYNLVKDKVDAAVSEVKHYLSQHRSSGRNLSAREPSQRGTEMDCPRETMVSKMLDRLHLEEPSGPVPGKCPERQAQDTSVGPATPARTSSDPVAGTPQIPHTLPFRGTTPGPVFTETPGPHPQRNQGDGRHGTPWYPWTPPNPMTGPPALVFNNCSEVQIGNYNSLVAPPRTTASSSAKYDQAQFGRGRGWQPFHKGVQVETISPGDGRTFPKRGQTCVVHYTGMLEDGKKVDSSRDRNKPFKFMLGKQEVIRGWEEGVAQMSVGQRAKLTISPDYAYGATGHPGIIPPHATLVFDVELLKLEGVQVETISPGDGRTFPKRGQTCVVHYTGMLEDGKKVDSSRDRNKPFKFMLGKQEVIRGWEEGVAQMSVGQRAKLTISPDYAYGATGHPGIIPPHATLVFDVELLKLE

SEQ ID NO: 1338 - protein, 732 aa, Artificial Sequence
  Synthetic: (huRIPK3-2xFv; TH1013 with no epitope tag)
MSCVKLWPSGAPAPLVSIEELENQELVGKGGFGTVFRAQHRKWGYDVAVKIVNSKAISREVKAMASLDNEFVLRLEGVIEKVNWDQDPKPALVTKFMENGSLSGLLQSQCPRPWPLLCRLLKEVVLGMFYLHDQNPVLLHRDLKPSNVLLDPELHVKLADFGLSTFQGGSQSGTGSGEPGGTLGYLAPELFVNVNRKASTASDVYSFGILMWAVLAGREVELPTEPSLVYEAVCNRQNRPSLAELPQAGPETPGLEGLKELMQLCWSSEPKDRPSFQECLPKTDEVFQMVENNMNAAVSTVKDFLSQLRSSNRRFSIPESGQGGTEMDGFRRTIENQHSRNDVMVSEWLNKLNLEEPPSSVPKKCPSLTKRSRAQEEQVPQAWTAGTSSDSMAQPPQTPETSTFRNQMPSPTSTGTPSPGPRGNQGAERQGMNWSCRTPEPNPVTGRPLVNIYNCSGVQVGDNNYLTMQQTTALPTWGLAPSGKGRGLQHPPPVGSQEGPKDPEAWSRPQGWYNHSGKGVQVETISPGDGRTFPKRGQTCVVHYTGMLEDGKKVDSSRDRNKPFKFMLGKQEVIRGWEEGVAQMSVGQRAKLTISPDYAYGATGHPGIIPPHATLVFDVELLKLEGVQVETISPGDGRTFPKRGQTCVVHYTGMLEDGKKVDSSRDRNKPFKFMLGKQEVIRGWEEGVAQMSVGQRAKLTISPDYAYGATGHPGIIPPHATLVFDVELLKLE

SEQ ID NO: 1339 - protein, 516 aa, Artificial Sequence
  Synthetic: (muRIPK3-IZ.Trimer; TH1015 with no epitope tag)
MSSVKLWPTGASAVPLVSREELKKLEFVGKGGFGVVFRAHHRTWNHDVAVKIVNSKKISWEVKAMVNLRNENVLLLLGVTEDLQWDFVSGQALVTRFMENGSLAGLLQPECPRPWPLLCRLLQEVVLGMCYLHSLNPPLLHRDLKPSNILLDPELHAKLADFGLSTFQGGSQSGSGSGSGSRDSGGTLAYLDPELLFDVNLKASKASDVYSFGILVWAVLAGREAELVDKTSLIRETVCDRQSRPPLTELPPGSPETPGLEKLKELMIHCWGSQSENRPSFQDCEPKTNEVYNLVKDKVDAAVSEVKHYLSQHRSSGRNLSAREPSQRGTEMDCPRETMVSKMLDRLHLEEPSGPVPGKCPERQAQDTSVGPATPARTSSDPVAGTPQIPHTLPFRGTTPGPVFTETPGPHPQRNQGDGRHGTPWYPWTPPNPMTGPPALVFNNCSEVQIGNYNSLVAPPRTTASSSAKYDQAQFGRGRGWQPFHKGGIKKEIEAIKKEQEAIKKKIEAIEKEIEA

SEQ ID NO: 1340 - protein, 515 aa, Artificial Sequence
  Synthetic: (muRIPK3-Foldon; TH1016 with no epitope tag)
MSSVKLWPTGASAVPLVSREELKKLEFVGKGGFGVVFRAHHRTWNHDVAVKIVNSKKISWEVKAMVNLRNENVLLLLGVTEDLQWDFVSGQALVTRFMENGSLAGLLQPECPRPWPLLCRLLQEVVLGMCYLHSLNPPLLHRDLKPSNILLDPELHAKLADFGLSTFQGGSQSGSGSGSGSRDSGGTLAYLDPELLFDVNLKASKASDVYSFGILVWAVLAGREAELVDKTSLIRETVCDRQSRPPLTELPPGSPETPGLEKLKELMIHCWGSQSENRPSFQDCEPKTNEVYNLVKDKVDAAVSEVKHYLSQHRSSGRNLSAREPSQRGTEMDCPRETMVSKMLDRLHLEEPSGPVPGKCPERQAQDTSVGPATPARTSSDPVAGTPQIPHTLPFRGTTPGPVFTETPGPHPQRNQGDGRHGTPWYPWTPPNPMTGPPALVFNNCSEVQIGNYNSLVAPPRTTASSSAKYDQAQFGRGRGWQPFHKGGGYIPEAPRDGQAYVRKDGEWVLLSTFL

SEQ ID NO: 1341 - protein, 594 aa, Artificial Sequence
  Synthetic: (muRIPK3-2xEE; TH1017 with no epitope tag)
MSSVKLWPTGASAVPLVSREELKKLEFVGKGGFGVVFRAHHRTWNHDVAVKIVNSKKISWEVKAMVNLRNENVLLLLGVTEDLQWDFVSGQALVTRFMENGSLAGLLQPECPRPWPLLCRLLQEVVLGMCYLHSLNPPLLHRDLKPSNILLDPELHAKLADFGLSTFQGGSQSGSGSGSGSRDSGGTLAYLDPELLFDVNLKASKASDVYSFGILVWAVLAGREAELVDKTSLIRETVCDRQSRPPLTELPPGSPETPGLEKLKELMIHCWGSQSENRPSFQDCEPKTNEVYNLVKDKVDAAVSEVKHYLSQHRSSGRNLSAREPSQRGTEMDCPRETMVSKMLDRLHLEEPSGPVPGKCPERQAQDTSVGPATPARTSSDPVAGTPQIPHTLPFRGTTPGPVFTETPGPHPQRNQGDGRHGTPWYPWTPPNPMTGPPALVFNNCSEVQIGNYNSLVAPPRTTASSSAKYDQAQFGRGRGWQPFHKGSDGSGSGSGSITIRAAFLEKENTALRTEIAELEKEVGRCENIVSKYETRYGPLGSDGSGSGSGSITIRAAFLEKENTALRTEIAELEKEVGRCENIVSKYETRYGPL

SEQ ID NO: 1342 - protein, 594 aa, Artificial Sequence
  Synthetic: (muRIPK3-2xRR; TH1018 with no epitope tag)
MSSVKLWPTGASAVPLVSREELKKLEFVGKGGFGVVFRAHHRTWNHDVAVKIVNSKKISWEVKAMVNLRNENVLLLLGVTEDLQWDFVSGQALVTRFMENGSLAGLLQPECPRPWPLLCRLLQEVVLGMCYLHSLNPPLLHRDLKPSNILLDPELHAKLADFGLSTFQGGSQSGSGSGSGSRDSGGTLAYLDPELLFDVNLKASKASDVYSFGILVWAVLAGREAELVDKTSLIRETVCDRQSRPPLTELPPGSPETPGLEKLKELMIHCWGSQSENRPSFQDCEPKTNEVYNLVKDKVDAAVSEVKHYLSQHRSSGRNLSAREPSQRGTEMDCPRETMVSKMLDRLHLEEPSGPVPGKCPERQAQDTSVGPATPARTSSDPVAGTPQIPHTLPFRGTTPGPVFTETPGPHPQRNQGDGRHGTPWYPWTPPNPMTGPPALVFNNCSEVQIGNYNSLVAPPRTTASSSAKYDQAQFGRGRGWQPFHKGSDGSGSGSGSLEIRAAFLEKENTALRTRAAELRKRVGRCRNIVSKYETRYGPLGSDGSGSGSGSLEIRAAFLEKENTALRTRAAELRKRVGRCRNIVSKYETRYGPL

SEQ ID NO: 1343 - protein, 540 aa, Artificial Sequence
  Synthetic: (muRIPK3-EE; TH1019 with no epitope tag)
MSSVKLWPTGASAVPLVSREELKKLEFVGKGGFGVVFRAHHRTWNHDVAVKIVNSKKISWEVKAMVNLRNENVLLLLGVTEDLQWDFVSGQALVTRFMENGSLAGLLQPECPRPWPLLCRLLQEVVLGMCYLHSLNPPLLHRDLKPSNILLDPELHAKLADFGLSTFQGGSQSGSGSGSGSRDSGGTLAYLDPELLFDVNLKASKASDVYSFGILVWAVLAGREAELVDKTSLIRETVCDRQSRPPLTELPPGSPETPGLEKLKELMIHCWGSQSENRPSFQDCEPKTNEVYNLVKDKVDAAVSEVKHYLSQHRSSGRNLSAREPSQRGTEMDCPRETMVSKMLDRLHLEEPSGPVPGKCPERQAQDTSVGPATPARTSSDPVAGTPQIPHTLPFRGTTPGPVFTETPGPHPQRNQGDGRHGTPWYPWTPPNPMTGPPALVFNNCSEVQIGNYNSLVAPPRTTASSSAKYDQAQFGRGRGWQPFHKGSDGSGSGSGSITIRAAFLEKENTALRTEIAELEKEVGRCENIVSKYETRYGPL

SEQ ID NO: 1344 - protein, 540 aa, Artificial Sequence
  Synthetic: (muRIPK3-RR; TH1020 with no epitope tag)
MSSVKLWPTGASAVPLVSREELKKLEFVGKGGFGVVFRAHHRTWNHDVAVKIVNSKKISWEVKAMVNLRNENVLLLLGVTEDLQWDFVSGQALVTRFMENGSLAGLLQPECPRPWPLLCRLLQEVVLGMCYLHSLNPPLLHRDLKPSNILLDPELHAKLADFGLSTFQGGSQSGSGSGSGSRDSGGTLAYLDPELLFDVNLKASKASDVYSFGILVWAVLAGREAELVDKTSLIRETVCDRQSRPPLTELPPGSPETPGLEKLKELMIHCWGSQSENRPSFQDCEPKTNEVYNLVKDKVDAAVSEVKHYLSQHRSSGRNLSAREPSQRGTEMDCPRETMVSKMLDRLHLEEPSGPVPGKCPERQAQDTSVGPATPARTSSDPVAGTPQIPHTLPFRGTTPGPVFTETPGPHPQRNQGDGRHGTPWYPWTPPNPMTGPPALVFNNCSEVQIGNYNSLVAPPRTTASSSAKYDQAQFGRGRGWQPFHKGSDGSGSGSGSLEIRAAFLEKENTALRTRAAELRKRVGRCRNIVSKYETRYGPL

SEQ ID NO: 1345 - protein, 262 aa, Artificial Sequence
  Synthetic: (Myr(Lck)-IZ-L-msFADD; TH3002 without epitope tag)
MGCVCSSNPEDDWMENGGIKKEIEAIKKEQEAIKKKIEAIEKEIEAGSGGGSGSGGGSDPFLVLLHSLSGSLSGNDLMELKFLCRERVSKRKLERVQSGLDLFTVLLEQNDLERGHTGLLRELLASLRRHDLLQRLDDFEAGTATAAPPGEADLQVAFDIVCDNVGRDWKRLARELKVSEAKMDGIEEKYPRSLSERVRESLKVWKNAEKKNASVAGLVKALRTCRLNLVADLVEEAQESVSKSENMSPVLRDSTVSSSETP

SEQ ID NO: 1346 - protein, 167 aa, Artificial Sequence
  Synthetic: (Myr(Lck)-IZ-L-huFADD-DD; TH3003 without epitope tag)
MGCVCSSNPEDDWMENGGIKKEIEAIKKEQEAIKKKIEAIEKEIEAGSGGGSGSGGGSPGEEDLCAAFNVICDNVGKDWRRLARQLKVSDTKIDSIEDRYPRNLTERVRESLRIWKNTEKENATVAHLVGALRSCQMNLVADLVQEVQQARDLQNRSGAMSPMSWNS

SEQ ID NO: 1347 - protein, 168 aa, Artificial Sequence
  Synthetic: (Myr(Lck)-IZ-L-msFADD-DD; TH3004 without epitope tag)
MGCVCSSNPEDDWMENGGIKKEIEAIKKEQEAIKKKIEAIEKEIEAGSGGGSGSGGGSPPGEADLQVAFDIVCDNVGRDWKRLARELKVSEAKMDGIEEKYPRSLSERVRESLKVWKNAEKKNASVAGLVKALRTCRLNLVADLVEEAQESVSKSENMSPVLRDSTVS

SEQ ID NO: 1348 - protein, 265 aa, Artificial Sequence
  Synthetic: (Myr(MMSV)-IZ-L-huFADD; TH3005 without epitope tag)
MGQTVTTPLSLTLDHWGGIKKEIEAIKKEQEAIKKKIEAIEKEIEAGSGGGSGSGGGSDPFLVLLHSVSSSLSSSELTELKFLCLGRVGKRKLERVQSGLDLFSMLLEQNDLEPGHTELLRELLASLRRHDLLRRVDDFEAGAAAGAAPGEEDLCAAFNVICDNVGKDWRRLARQLKVSDTKIDSIEDRYPRNLTERVRESLRIWKNTEKENATVAHLVGALRSCQMNLVADLVQEVQQARDLQNRSGAMSPMSWNSDASTSEAS

SEQ ID NO: 1349 - protein, 262 aa, Artificial Sequence
  Synthetic: (Myr(MMSV)-IZ-L-msFADD; TH3006 without epitope tag)
MGQTVTTPLSLTLDHWGGIKKEIEAIKKEQEAIKKKIEAIEKEIEAGSGGGSGSGGGSDPFLVLLHSLSGSLSGNDLMELKFLCRERVSKRKLERVQSGLDLFTVLLEQNDLERGHTGLLRELLASLRRHDLLQRLDDFEAGTATAAPPGEADLQVAFDIVCDNVGRDWKRLARELKVSEAKMDGIEEKYPRSLSERVRESLKVWKNAEKKNASVAGLVKALRTCRLNLVADLVEEAQESVSKSENMSPVLRDSTVSSSETP

SEQ ID NO: 1350 - protein, 167 aa, Artificial Sequence
  Synthetic: (Myr(MMSV)-IZ-L-huFADD-DD; TH3007 without epitope tag)
MGQTVTTPLSLTLDHWGGIKKEIEAIKKEQEAIKKKIEAIEKEIEAGSGGGSGSGGGSPGEEDLCAAFNVICDNVGKDWRRLARQLKVSDTKIDSIEDRYPRNLTERVRESLRIWKNTEKENATVAHLVGALRSCQMNLVADLVQEVQQARDLQNRSGAMSPMSWNS

SEQ ID NO: 1351 - protein, 168 aa, Artificial Sequence
  Synthetic: (Myr(MMSV)-IZ-L-msFADD-DD; TH3008 without epitope tag)
MGQTVTTPLSLTLDHWGGIKKEIEAIKKEQEAIKKKIEAIEKEIEAGSGGGSGSGGGSPPGEADLQVAFDIVCDNVGRDWKRLARELKVSEAKMDGIEEKYPRSLSERVRESLKVWKNAEKKNASVAGLVKALRTCRLNLVADLVEEAQESVSKSENMSPVLRDSTVS

SEQ ID NO: 1352 - protein, 410 aa, Artificial Sequence
  Synthetic: (Caspase-4, full-length + IZ domain; P2006 without epitope tag)
MRMKQIEDKIEEILSKIYHIENEIARIKKLIGERAEGNHRKKPLKVLESLGKDFLTGVLDNLVEQNVLNWKEEEKKKYYDAKTEDKVRVMADSMQEKQRMAGQMLLQTFFNIDQISPNKKAHPNMEAGPPESGESTDALKLCPHEEFLRLCKERAEEIYPIKERNNRTRLALIICNTEFDHLPPRNGADFDITGMKELLEGLDYSVDVEENLTARDMESALRAFATRPEHKSSDSTFLVLMSHGILEGICGTVHDEKKPDVLLYDTIFQIFNNRNCLSLKDKPKVIIVQACRGANRGELWVRDSPASLEVASSQSSENLEEDAVYKTHVEKDFIAFCSSTPHNVSWRDSTMGSIFITQLITCFQKYSWCCHLEEVFRKVQQSFETPRAKAQMPTIERLSMTRYFYLFPGN

SEQ ID NO: 1353 - protein, 331 aa, Artificial Sequence
  Synthetic: (Caspase-4, N.del + IZ domain; P2009 without epitope tag)
MRMKQIEDKIEEILSKIYHIENEIARIKKLIGERQISPNKKAHPNMEAGPPESGESTDALKLCPHEEFLRLCKERAEEIYPIKERNNRTRLALIICNTEFDHLPPRNGADFDITGMKELLEGLDYSVDVEENLTARDMESALRAFATRPEHKSSDSTFLVLMSHGILEGICGTVHDEKKPDVLLYDTIFQIFNNRNCLSLKDKPKVIIVQACRGANRGELWVRDSPASLEVASSQSSENLEEDAVYKTHVEKDFIAFCSSTPHNVSWRDSTMGSIFITQLITCFQKYSWCCHLEEVFRKVQQSFETPRAKAQMPTIERLSMTRYFYLFPGN

SEQ ID NO: 1354 - protein, 410 aa, Artificial Sequence
  Synthetic: (Caspase-4, full-length + DM domain; P2012 without epitope tag)
MRMKQLEDKIEELLSKIYHLENEIARLKKLIGERAEGNHRKKPLKVLESLGKDFLTGVLDNLVEQNVLNWKEEEKKKYYDAKTEDKVRVMADSMQEKQRMAGQMLLQTFFNIDQISPNKKAHPNMEAGPPESGESTDALKLCPHEEFLRLCKERAEEIYPIKERNNRTRLALIICNTEFDHLPPRNGADFDITGMKELLEGLDYSVDVEENLTARDMESALRAFATRPEHKSSDSTFLVLMSHGILEGICGTVHDEKKPDVLLYDTIFQIFNNRNCLSLKDKPKVIIVQACRGANRGELWVRDSPASLEVASSQSSENLEEDAVYKTHVEKDFIAFCSSTPHNVSWRDSTMGSIFITQLITCFQKYSWCCHLEEVFRKVQQSFETPRAKAQMPTIERLSMTRYFYLFPGN

SEQ ID NO: 1355 - protein, 331 aa, Artificial Sequence
  Synthetic: (Caspase-4, N.del + DM domain; P2015 without epitope tag)
MRMKQLEDKIEELLSKIYHLENEIARLKKLIGERQISPNKKAHPNMEAGPPESGESTDALKLCPHEEFLRLCKERAEEIYPIKERNNRTRLALIICNTEFDHLPPRNGADFDITGMKELLEGLDYSVDVEENLTARDMESALRAFATRPEHKSSDSTFLVLMSHGILEGICGTVHDEKKPDVLLYDTIFQIFNNRNCLSLKDKPKVIIVQACRGANRGELWVRDSPASLEVASSQSSENLEEDAVYKTHVEKDFIAFCSSTPHNVSWRDSTMGSIFITQLITCFQKYSWCCHLEEVFRKVQQSFETPRAKAQMPTIERLSMTRYFYLFPGN

SEQ ID NO: 1356 - protein, 377 aa, Artificial Sequence
  Synthetic: (Caspase-4, full-length wild-type; P2018 without epitope tag)
MAEGNHRKKPLKVLESLGKDFLTGVLDNLVEQNVLNWKEEEKKKYYDAKTEDKVRVMADSMQEKQRMAGQMLLQTFFNIDQISPNKKAHPNMEAGPPESGESTDALKLCPHEEFLRLCKERAEEIYPIKERNNRTRLALIICNTEFDHLPPRNGADFDITGMKELLEGLDYSVDVEENLTARDMESALRAFATRPEHKSSDSTFLVLMSHGILEGICGTVHDEKKPDVLLYDTIFQIFNNRNCLSLKDKPKVIIVQACRGANRGELWVRDSPASLEVASSQSSENLEEDAVYKTHVEKDFIAFCSSTPHNVSWRDSTMGSIFITQLITCFQKYSWCCHLEEVFRKVQQSFETPRAKAQMPTIERLSMTRYFYLFPGN

SEQ ID NO: 1357 - protein, 467 aa, Artificial Sequence
  Synthetic: (Caspase-5, full-length + IZ domain; P2007 without epitope tag)
MRMKQIEDKIEEILSKIYHIENEIARIKKLIGERAEDSGKKKRRKNFEAMFKGILQSGLDNFVINHMLKNNVAGQTSIQTLVPNTDQKSTSVKKDNHKKKTVKMLEYLGKDVLHGVFNYLAKHDVLTLKEEEKKKYYDTKIEDKALILVDSLRKNRVAHQMFTQTLLNMDQKITSVKPLLQIEAGPPESAESTNILKLCPREEFLRLCKKNHDEIYPIKKREDRRRLALIICNTKFDHLPARNGAHYDIVGMKRLLQGLGYTVVDEKNLTARDMESVLRAFAARPEHKSSDSTFLVLMSHGILEGICGTAHKKKKPDVLLYDTIFQIFNNRNCLSLKDKPKVIIVQACRGEKHGELWVRDSPASLALISSQSSENLEADSVCKIHEEKDFIAFCSSTPHNVSWRDRTRGSIFITELITCFQKYSCCCHLMEIFRKVQKSFEVPQAKAQMPTIERATLTRDFYLFPGN

SEQ ID NO: 1358 - protein, 332 aa, Artificial Sequence
  Synthetic: (Caspase-5, N.del + IZ domain; P2010 without epitope tag)
MRMKQIEDKIEEILSKIYHIENEIARIKKLIGERDQKITSVKPLLQIEAGPPESAESTNILKLCPREEFLRLCKKNHDEIYPIKKREDRRRLALIICNTKFDHLPARNGAHYDIVGMKRLLQGLGYTVVDEKNLTARDMESVLRAFAARPEHKSSDSTFLVLMSHGILEGICGTAHKKKKPDVLLYDTIFQIFNNRNCLSLKDKPKVIIVQACRGEKHGELWVRDSPASLALISSQSSENLEADSVCKIHEEKDFIAFCSSTPHNVSWRDRTRGSIFITELITCFQKYSCCCHLMEIFRKVQKSFEVPQAKAQMPTIERATLTRDFYLFPGN

SEQ ID NO: 1359 - protein, 467 aa, Artificial Sequence
  Synthetic: (Caspase-5, full-length + DM domain; P2013 without epitope tag)
MRMKQLEDKIEELLSKIYHLENEIARLKKLIGERAEDSGKKKRRKNFEAMFKGILQSGLDNFVINHMLKNNVAGQTSIQTLVPNTDQKSTSVKKDNHKKKTVKMLEYLGKDVLHGVFNYLAKHDVLTLKEEEKKKYYDTKIEDKALILVDSLRKNRVAHQMFTQTLLNMDQKITSVKPLLQIEAGPPESAESTNILKLCPREEFLRLCKKNHDEIYPIKKREDRRRLALIICNTKFDHLPARNGAHYDIVGMKRLLQGLGYTVVDEKNLTARDMESVLRAFAARPEHKSSDSTFLVLMSHGILEGICGTAHKKKKPDVLLYDTIFQIFNNRNCLSLKDKPKVIIVQACRGEKHGELWVRDSPASLALISSQSSENLEADSVCKIHEEKDFIAFCSSTPHNVSWRDRTRGSIFITELITCFQKYSCCCHLMEIFRKVQKSFEVPQAKAQMPTIERATLTRDFYLFPGN

SEQ ID NO: 1360 - protein, 332 aa, Artificial Sequence
  Synthetic: (Caspase-5, N.del + DM domain; P2016 without epitope tag)
MRMKQLEDKIEELLSKIYHLENEIARLKKLIGERDQKITSVKPLLQIEAGPPESAESTNILKLCPREEFLRLCKKNHDEIYPIKKREDRRRLALIICNTKFDHLPARNGAHYDIVGMKRLLQGLGYTVVDEKNLTARDMESVLRAFAARPEHKSSDSTFLVLMSHGILEGICGTAHKKKKPDVLLYDTIFQIFNNRNCLSLKDKPKVIIVQACRGEKHGELWVRDSPASLALISSQSSENLEADSVCKIHEEKDFIAFCSSTPHNVSWRDRTRGSIFITELITCFQKYSCCCHLMEIFRKVQKSFEVPQAKAQMPTIERATLTRDFYLFPGN

SEQ ID NO: 1361 - protein, 332 aa, Artificial Sequence; identical to SEQ ID NO: 1360
  Synthetic: (Caspase-5, full-length wild-type; P2019 without epitope tag)

SEQ ID NO: 1362 - protein, 406 aa, Artificial Sequence
  Synthetic: (Caspase-11, full-length + IZ domain; P2005 without epitope tag)
MRMKQIEDKIEEILSKIYHIENEIARIKKLIGERAENKHPDKPLKVLEQLGKEVLTEYLEKLVQSNVLKLKEEDKQKFNNAERSDKRWVFVDAMKKKHSKVGEMLLQTFFSVDPGSHHGEANLEMEEPEESLNTLKLCSPEEFTRLCREKTQEIYPIKEANGRTRKALIICNTEFKHLSLRYGANFDIIGMKGLLEDLGYDVVVKEELTAEGMESEMKDFAALSEHQTSDSTFLVLMSHGTLHGICGTMHSEKTPDVLQYDTIYQIFNNCHCPGLRDKPKVIIVQACRGGNSGEMWIRESSKPQLCRGVDLPRNMEADAVKLSHVEKDFIAFYSTTPHHLSYRDKTGGSYFITRLISCFRKHACSCHLFDIFLKVQQSFEKASIHSQMPTIDRATLTRYFYLFPGN

SEQ ID NO: 1363 - protein, 327 aa, Artificial Sequence
  Synthetic: (Caspase-11, N.del + IZ domain; P2008 without epitope tag)
MRMKQIEDKIEEILSKIYHIENEIARIKKLIGERPGSHHGEANLEMEEPEESLNTLKLCSPEEFTRLCREKTQEIYPIKEANGRTRKALIICNTEFKHLSLRYGANFDIIGMKGLLEDLGYDVVVKEELTAEGMESEMKDFAALSEHQTSDSTFLVLMSHGTLHGICGTMHSEKTPDVLQYDTIYQIFNNCHCPGLRDKPKVIIVQACRGGNSGEMWIRESSKPQLCRGVDLPRNMEADAVKLSHVEKDFIAFYSTTPHHLSYRDKTGGSYFITRLISCFRKHACSCHLFDIFLKVQQSFEKASIHSQMPTIDRATLTRYFYLFPGN

SEQ ID NO: 1364 - protein, 327 aa, Artificial Sequence; identical to SEQ ID NO: 1363
  Synthetic: (Caspase-11, full-length + DM domain; P2011 without epitope tag)

SEQ ID NO: 1365 - protein, 406 aa, Artificial Sequence
  Synthetic: (Caspase-11, N.del + DM domain; P2014 without epitope tag)
MRMKQLEDKIEELLSKIYHLENEIARLKKLIGERAENKHPDKPLKVLEQLGKEVLTEYLEKLVQSNVLKLKEEDKQKFNNAERSDKRWVFVDAMKKKHSKVGEMLLQTFFSVDPGSHHGEANLEMEEPEESLNTLKLCSPEEFTRLCREKTQEIYPIKEANGRTRKALIICNTEFKHLSLRYGANFDIIGMKGLLEDLGYDVVVKEELTAEGMESEMKDFAALSEHQTSDSTFLVLMSHGTLHGICGTMHSEKTPDVLQYDTIYQIFNNCHCPGLRDKPKVIIVQACRGGNSGEMWIRESSKPQLCRGVDLPRNMEADAVKLSHVEKDFIAFYSTTPHHLSYRDKTGGSYFITRLISCFRKHACSCHLFDIFLKVQQSFEKASIHSQMPTIDRATLTRYFYLFPGN

SEQ ID NO: 1366 - protein, 373 aa, Artificial Sequence
  Synthetic: (Caspase-11, full-length wild-type; P2017 without epitope tag)
MAENKHPDKPLKVLEQLGKEVLTEYLEKLVQSNVLKLKEEDKQKFNNAERSDKRWVFVDAMKKKHSKVGEMLLQTFFSVDPGSHHGEANLEMEEPEESLNTLKLCSPEEFTRLCREKTQEIYPIKEANGRTRKALIICNTEFKHLSLRYGANFDIIGMKGLLEDLGYDVVVKEELTAEGMESEMKDFAALSEHQTSDSTFLVLMSHGTLHGICGTMHSEKTPDVLQYDTIYQIFNNCHCPGLRDKPKVIIVQACRGGNSGEMWIRESSKPQLCRGVDLPRNMEADAVKLSHVEKDFIAFYSTTPHHLSYRDKTGGSYFITRLISCFRKHACSCHLFDIFLKVQQSFEKASIHSQMPTIDRATLTRYFYLFPGN

SEQ ID NO: 1367 - protein, 483 aa, Artificial Sequence
  Synthetic: (human GSDMD; SAW001 with no epitope tag)
GSAFERVVRRVVQELDHGGEFIPVTSLQSSTGFQPYCLVVRKPSSSWFWKPRYKCVNLSIKDILEPDAAEPDVQRGRSFHFYDAMDGQIQGSVELAAPGQAKIAGGAAVSDSSSTSMNVYSLSVDPNTWQTLLHERHLRQPEHKVLQQLRSRGDNVYVVTEVLQTQKEVEVTRTHKREGSGRFSLPGATCLQGEGQGHLSQKKTVTIPSGSTLAFRVAQLVIDSDLDVLLFPDKKQRTFQPPATGHKRSTSEGAWPQLPSGLSMMRCLHNFLTDGVPAEGAFTEDFQGLRAEVETISKELELLDRELCQLLLEGLEGVLRDQLALRALEEALEQGQSLGPVEPLDGPAGAVLECLVLSSGMLVPELAIPVVYLLGALTMLSETQHKLLAEALESQTLLGPLELVGSLLEQSAPWQERSTMSLPPGLLGNSWGEGAPAWVLLDECGLELGEDTPHVCWEPQAQGRMCALYASLALLSGLSQEPH

SEQ ID NO: 1368 - protein, 274 aa, Artificial Sequence
  Synthetic: (human GSDMD(1-275); SAW002 with no epitope tag)
GSAFERVVRRVVQELDHGGEFIPVTSLQSSTGFQPYCLVVRKPSSSWFWKPRYKCVNLSIKDILEPDAAEPDVQRGRSFHFYDAMDGQIQGSVELAAPGQAKIAGGAAVSDSSSTSMNVYSLSVDPNTWQTLLHERHLRQPEHKVLQQLRSRGDNVYVVTEVLQTQKEVEVTRTHKREGSGRFSLPGATCLQGEGQGHLSQKKTVTIPSGSTLAFRVAQLVIDSDLDVLLFPDKKQRTFQPPATGHKRSTSEGAWPQLPSGLSMMRCLHNFLTD

SEQ ID NO: 1369 - protein, 209 aa, Artificial Sequence
  Synthetic: (human GSDMD(276-484); SAW003 with no epitope tag)
GVPAEGAFTEDFQGLRAEVETISKELELLDRELCQLLLEGLEGVLRDQLALRALEEALEQGQSLGPVEPLDGPAGAVLECLVLSSGMLVPELAIPVVYLLGALTMLSETQHKLLAEALESQTLLGPLELVGSLLEQSAPWQERSTMSLPPGLLGNSWGEGAPAWVLLDECGLELGEDTPHVCWEPQAQGRMCALYASLALLSGLSQEPH

SEQ ID NO: 1370 - protein, 486 aa, Artificial Sequence
  Synthetic: (mouse GSDMD; SAW004 with no epitope tag)
PSAFEKVVKNVIKEVSGSRGDLIPVDSLRNSTSFRPYCLLNRKFSSSRFWKPRYSCVNLSIKDILEPSAPEPEPECFGSFKVSDVVDGNIQGRVMLSGMGEGKISGGAAVSDSSSASMNVCILRVTQKTWETMQHERHLQQPENKILQQLRSRGDDLFVVTEVLQTKEEVQITEVHSQEGSGQFTLPGALCLKGEGKGHQSRKKMVTIPAGSILAFRVAQLLIGSKWDILLVSDEKQRTFEPSSGDRKAVGQRHHGLNVLAALCSIGKQLSLLSDGIDEEELIEAADFQGLYAEVKACSSELESLEMELRQQILVNIGKILQDQPSMEALEASLGQGLCSGGQVEPLDGPAGCILECLVLDSGELVPELAAPIFYLLGALAVLSETQQQLLAKALETTVLSKQLELVKHVLEQSTPWQEQSSVSLPTVLLGDCWDEKNPTWVLLEECGLRLQVESPQVHWEPTSLIPTSALYASLFLLSSLGQKPC

SEQ ID NO: 1371 - protein, 275 aa, Artificial Sequence
  Synthetic: (mouse GSDMD(1-276); SAW005 with no epitope tag)
PSAFEKVVKNVIKEVSGSRGDLIPVDSLRNSTSFRPYCLLNRKFSSSRFWKPRYSCVNLSIKDILEPSAPEPEPECFGSFKVSDVVDGNIQGRVMLSGMGEGKISGGAAVSDSSSASMNVCILRVTQKTWETMQHERHLQQPENKILQQLRSRGDDLFVVTEVLQTKEEVQITEVHSQEGSGQFTLPGALCLKGEGKGHQSRKKMVTIPAGSILAFRVAQLLIGSKWDILLVSDEKQRTFEPSSGDRKAVGQRHHGLNVLAALCSIGKQLSLLSD

SEQ ID NO: 1372 - protein, 211 aa, Artificial Sequence
  Synthetic: (mouse GSDMD(277-487); SAW006 with no epitope tag)
GIDEEELIEAADFQGLYAEVKACSSELESLEMELRQQILVNIGKILQDQPSMEALEASLGQGLCSGGQVEPLDGPAGCILECLVLDSGELVPELAAPIFYLLGALAVLSETQQQLLAKALETTVLSKQLELVKHVLEQSTPWQEQSSVSLPTVLLGDCWDEKNPTWVLLEECGLRLQVESPQVHWEPTSLIPTSALYASLFLLSSLGQKPC

SEQ ID NO: 1373 - protein, 574 aa, Artificial Sequence
  Synthetic: (hu.caNLRP3(PYD_NACHT_IZ); P3005 without epitope tag)
MKMASTRCKLARYLEDLEDVDLKKFKMHLEDYPPQKGCIPLPRGQTEKADHVDLATLMIDFNGEEKAWAMAVWIFAAINRRDLYEKAKRDEPKWGSDNARVSNPTVICQEDSIEEEWMGLLEYLSRISICKMKKDYRKKYRKYVRSRFQCIEDRNARLGESVSLNKRYTRLRLIKEHRSQQEREQELLAIGKTKTCESPVSPIKMELLFDPDDEHSEPVHTVVFQGAAGIGKTILARKMMLDWASGTLYQDRFDYLFYIHCREVSLVTQRSLGDLIMSCCPDPNPPIHKIVRKPSRILFLMDGFDELQGAFDEHIGPLCTDWQKAERGDILLSSLIRKKLLPEASLLITTRPVALEKLQHLLDHPRHVEILGFSEAKRKEYFFKYFSDEAQARAAFSLIQENEVLFTMCFIPLVCWIVCTGLKQQMESGKSLAQTSKTTTAVYVFFLSSLLQPRGGSQEHGLCAHLWGLCSLAADGIWNQKILFEESDLRNHGLQKADVSAFLRMNLFQKEVDCEKFYSFIHMTFQEFFAAMYYLLGGGSGGGSGGIKKEIEAIKKEQEAIKKKIEAIEKEIEA

SEQ ID NO: 1374 - protein, 570 aa, Artificial Sequence
  Synthetic: (mu.caNLRP3(PYD_NACHT_IZ); P3007 without epitope tag)
MTSVRCKLAQYLEDLEDVDLKKFKMHLEDYPPEKGCIPVPRGQMEKADHLDLATLMIDFNGEEKAWAMAVWIFAAINRRDLWEKAKKDQPEWNDTCTSHSSMVCQEDSLEEEWMGLLGYLSRISICKKKKDYCKMYRRHVRSRFYSIKDRNARLGESVDLNSRYTQLQLVKEHPSKQEREHELLTIGRTKMRDSPMSSLKLELLFEPEDGHSEPVHTVVFQGAAGIGKTILARKIMLDWALGKLFKDKFDYLFFIHCREVSLRTPRSLADLIVSCWPDPNPPVCKILRKPSRILFLMDGFDELQGAFDEHIGEVCTDWQKAVRGDILLSSLIRKKLLPKASLLITTRPVALEKLQHLLDHPRHVEILGFSEAKRKEYFFKYFSNELQAREAFRLIQENEVLFTMCFIPLVCWIVCTGLKQQMETGKSLAQTSKTTTAVYVFFLSSLLQSRGGIEEHLFSDYLQGLCSLAADGIWNQKILFEECDLRKHGLQKTDVSAFLRMNVFQKEVDCERFYSFSHMTFQEFFAAMYYLLGGGSGGGSGGIKKEIEAIKKEQEAIKKKIEAIEKEIEA

SEQ ID NO: 1375 - protein, 767 aa, Artificial Sequence
  Synthetic: (muPYRIN-B30.2(V726A); P3002 without epitope tag)
MAKTLGDHLLNTLEELLPYDFEKFKFKLQNTSLEKGHSKIPRGHMQMARPVKLASLLITYYGEEYAVRLTLQILRATNQRQLAEELRKATGTEHLIEENRVGGSVQSSVENKAKSVKVPDVPEGDGTQQNNDESDTLPSSQAEVGKGPQKKSLTKRKDQRGPESLDSQTKPWTRSTAPLYRRTQGTQSPGDKESTASAQLRRNVSSAGRLQGLYNNAPGRRESKKAEVYVYLPSGKKRPRSLEITTYSREGEPPNSEVLPTQEETRNGSLIRMRTATLNGRTTGALEKGTGIPEHSMVLDEKTFRNMSSKTSLIGEERCPTSWTENGNGSPETTESSGETAGSILSDPEVPLSLCEKPAKTPEDPASLGQAACEGRSQDKAVCPLCHTQEGDLRGDTCVQSSCSCSIAPGDPKASGRCSICFQCQGLLARKSCEAQSPQSLPQCPRHMKQVLLLFCEDHREPICLICRLSLEHQGHRVRPIEEAALEYKEQIREQLERLREMRGYVEEHRLQGDKKTDDFLKQTEIQKQKISCPLEKLYQLLEKQEQLFVTWLQELSQTISKVRETYYTRVSLLDEMIEELEAKQDQPEWDLMQDIGITLHRAKMMSASELLDTPPGVKEKLHLLYQKSKSVEKNMQCFSEMLSSEMAFSASDVAKWEGRQPSATQVQGLVPTVHLKCDGAHTQDCDVVFYPEREAGGSEPKDYLHPQPAQDTPELHEIHSRNNKRKFKSFLKWKPSFSRTDWRLRTCCYRDLDQAAAHPNLIFSMI

SEQ ID NO: 1376 - protein, 969 aa, Artificial Sequence
  Synthetic: (muPYRIN-B30.2; P3004 without epitope tag)
MAKTLGDHLLNTLEELLPYDFEKFKFKLQNTSLEKGHSKIPRGHMQMARPVKLASLLITYYGEEYAVRLTLQILRATNQRQLAEELRKATGTEHLIEENRVGGSVQSSVENKAKSVKVPDVPEGDGTQQNNDESDTLPSSQAEVGKGPQKKSLTKRKDQRGPESLDSQTKPWTRSTAPLYRRTQGTQSPGDKESTASAQLRRNVSSAGRLQGLYNNAPGRRESKKAEVYVYLPSGKKRPRSLEITTYSREGEPPNSEVLPTQEETRNGSLIRMRTATLNGRTTGALEKGTGIPEHSMVLDEKTFRNMSSKTSLIGEERCPTSWTENGNGSPETTESSGETAGSILSDPEVPLSLCEKPAKTPEDPASLGQAACEGRSQDKAVCPLCHTQEGDLRGDTCVQSSCSCSIAPGDPKASGRCSICFQCQGLLARKSCEAQSPQSLPQCPRHMKQVLLLFCEDHREPICLICRLSLEHQGHRVRPIEEAALEYKEQIREQLERLREMRGYVEEHRLQGDKKTDDFLKQTEIQKQKISCPLEKLYQLLEKQEQLFVTWLQELSQTISKVRETYYTRVSLLDEMIEELEAKQDQPEWDLMQDIGITLHRAKMMSASELLDTPPGVKEKLHLLYQKSKSVEKNMQCFSEMLSSEMAFSASDVAKWEGRQPSATQVQGLVPTVHLKCDGAHTQDCDVVFYPEREAGGSEPKDYLHPQPAQDTPELHEIHSRNNKRKFKSFLKWKPSFSRTDWRLRTCCYRDLDQAAAHPNLIFSMISEMEMFNVPELIGAQAHAVNVILDAETAYPNLIFSDDLKSVRLGNKWERLPDGPQRFDSCIIVLGSPSFLSGRRYWEVEVGDKTAWILGACKTSISRKGNMTLSPENGYWVVIMMKENEYQASSVPPTRLLIKEPPKRVGIFVDYRVGSISFYNVTARSHIYTFASCSFSGPLQPIFSPGTRDGGKNTAPLTICPVGGQGPD

SEQ ID NO: 1377 - protein, 135 aa, Artificial Sequence
  Synthetic: (hu.caASC(IZ_CARD); P3006 without epitope tag)
MGGIKKEIEAIKKEQEAIKKKIEAIEKEIEAGSGAAPAGIQAPPQSAAKPGLHFIDQHRAALIARVTNVEWLLDALYGKVLTDEQYQAVRAEPTNPSKMRKLFSFTPAWNWTCKDLLLQALRESQSYLVEDLERS

SEQ ID NO: 1378 - protein, 134 aa, Artificial Sequence
  Synthetic: (mu.caASC(IZ_CARD); P3008 without epitope tag)
MGGIKKEIEAIKKEQEAIKKKIEAIEKEIEAGSGAVAAAASVPAQSTARTGHFVDQHRQALIARVTEVDGVLDALHGSVLTEGQYQAVRAETTSQDKMRKLFSFVPSWNLTCKDSLLQALKEIHPYLVMDLEQS

SEQ ID NO: 1379 - protein, 518 aa, Artificial Sequence
  Synthetic: (huRIPK3; TH1014 with no epitope tag)
MSCVKLWPSGAPAPLVSIEELENQELVGKGGFGTVFRAQHRKWGYDVAVKIVNSKAISREVKAMASLDNEFVLRLEGVIEKVNWDQDPKPALVTKFMENGSLSGLLQSQCPRPWPLLCRLLKEVVLGMFYLHDQNPVLLHRDLKPSNVLLDPELHVKLADFGLSTFQGGSQSGTGSGEPGGTLGYLAPELFVNVNRKASTASDVYSFGILMWAVLAGREVELPTEPSLVYEAVCNRQNRPSLAELPQAGPETPGLEGLKELMQLCWSSEPKDRPSFQECLPKTDEVFQMVENNMNAAVSTVKDFLSQLRSSNRRFSIPESGQGGTEMDGFRRTIENQHSRNDVMVSEWLNKLNLEEPPSSVPKKCPSLTKRSRAQEEQVPQAWTAGTSSDSMAQPPQTPETSTFRNQMPSPTSTGTPSPGPRGNQGAERQGMNWSCRTPEPNPVTGRPLVNIYNCSGVQVGDNNYLTMQQTTALPTWGLAPSGKGRGLQHPPPVGSQEGPKDPEAWSRPQGWYNHSGK

SEQ ID NO: 1380 - DNA, 47 bp, Artificial Sequence; identical to SEQ ID NO: 194
  Synthetic: (5UTR)

SEQ ID NO: 1381 - DNA, 12 bp, Artificial Sequence
  Synthetic: (GC-Rich RNA Element)
ccgccgccgccg

SEQ ID NO: 1382 - DNA, 15 bp, Artificial Sequence
  Synthetic: (GC Rich RNA Element)
ccgccgccgccgccg

SEQ ID NO: 1383 - DNA, 10 bp, Artificial Sequence
  Synthetic: (GC Rich RNA Element)
ccccggcgcc

SEQ ID NO: 1384 - DNA, 41 bp, Artificial Sequence
  Synthetic: (5UTR)
gggaaataagagagaaaagaagagtaagaagaaatataaga

SEQ ID NO: 1385 - DNA, 57 bp, Artificial Sequence
  Synthetic: (5UTR  V1)
gggaaataagagagaaaagaagagtaagaagaaatataagaccccggcgccgccacc

SEQ ID NO: 1386 - DNA, 54 bp, Artificial Sequence
  Synthetic: (5UTR-V2)
gggaaataagagagaaaagaagagtaagaagaaatataagaccccggcgccacc

SEQ ID NO: 1387 - protein, 729 aa, Artificial Sequence
  Synthetic: (Human MAVS)
MEHDLERGPPGPRRPPRGPPLSSSLGLALLLLLLALLFWLYIVMSDWTGGALLVLYSFALMLIIIILIIFIFRRDLLCPLGALCILLLMITLLLIALWNLHGQALFLGIVLFIFGCLLVLGIWIYLLEMLWRLGATIWQLLAFFLAFFLDLILLIIALYLQQNWWTLLVDLLWLLLFLAILIWMYYHGQRPFAEDKTYKYICRNFSNFCNVDVVEILPYLPCLTARDQDRLRATCTLSGNRDTLWHLFNTLQRRPGWVEYFIAALRGCELVDLADEVASVYQSYQPRTSDRPPDPLEPPSLPAERPGPPTPAAAHSIPYNSCREKEPSYPMPVQETQAPESPGENSEQALQTLSPRAIPRNPDGGPLESSSDLAALSPLTSSGHQEQDTELGSTHTAGATSSLTPSRGPVSPSVSFQPLARSTPRASRLPGPTGSVVSTGTSFSSSSPGLASAGAAEGKQGAESDQAEPIICSSGAEAPANSLPSKVPTTLMPVNTVALKVPANPASVSTVPSKLPTSSKPPGAVPSNALTNPAPSKLPINSTRAGMVPSKVPTSMVLTKVSASTVPTDGSSRNEETPAAPTPAGATGGSSAWLDSSSENRGLGSELSKPGVLASQVDSPFSGCFEDLAISASTSLGMGPCHGPEENEYKSEGTFGIHVAENPSIQLLEGNPGPPADPDGGPRPQADRKFQEREVPCHRPSPGALWLQVAVTGVLVVTLLVVLYRRRLH

SEQ ID NO: 1388 - protein, 9 aa, Artificial Sequence
  Synthetic: (EBV BRLF1)
ATIGTAMYK

SEQ ID NO: 1389 - protein, 9 aa, Artificial Sequence
  Synthetic: (FLU)
SIIPSGPLK

SEQ ID NO: 1390 - protein, 9 aa, Artificial Sequence
  Synthetic: (HIV NEF)
AVDLSHFLK

SEQ ID NO: 1391 - protein, 10 aa, Artificial Sequence
  Synthetic: (EBV)
AVFDRKSDAK

SEQ ID NO: 1392 - protein, 9 aa, Artificial Sequence
  Synthetic: (HBV CORE ANUIGEN)
YVNVNMGLK

SEQ ID NO: 1393 - protein, 9 aa, Artificial Sequence
  Synthetic: (HCV)
RVCEKMALY

SEQ ID NO: 1394 - protein, 9 aa, Artificial Sequence
  Synthetic: (CMV)
KLGGALQAK

SEQ ID NO: 1395 - DNA, 1041 bp, Artificial Sequence
  Synthetic: DM_hsCASP1 (self-activating human Caspase 1); P2025 without epitope tag)
atgagaatgaagcagctggaggacaagatcgaggagctgctgagcaagatctaccacctggagaacgagatcgccagactgaagaagctgatcggcgaggccgaccagaccagcggcaactacctgaacatgcaggacagccagggcgtgctgagcagcttccccgccccccaggccgtgcaggacaaccccgccatgcccaccagcagcggcagcgagggcaacgtgaagctgtgcagcctggaggaggcccagagaatctggaagcagaagagcgccgagatctaccccatcatggacaagagcagcagaaccagactggccctgatcatctgcaacgaggagttcgacagcatccccagaagaaccggcgccgaggtggacatcaccggcatgaccatgctgctgcagaacctgggctacagcgtggacgtgaagaagaacctgaccgccagcgacatgaccaccgagctggaggccttcgcccacagacccgagcacaagaccagcgacagcaccttcctggtgttcatgagccacggcatcagagagggcatctgcggcaagaagcacagcgagcaggtgcccgacatcctgcagctgaacgccatcttcaacatgctgaacaccaagaactgccccagcctgaaggacaagcccaaggtgatcatcatccaggcctgcagaggcgacagccccggcgtggtgtggttcaaggacagcgtgggcgtgagcggcaacctgagcctgcccaccaccgaggagttcgaggacgacgccatcaagaaggcccacatcgagaaggacttcatcgccttctgcagcagcacccccgacaacgtgagctggagacaccccaccatgggcagcgtgttcatcggcagactgatcgagcacatgcaggagtacgcctgcagctgcgacgtggaggagatcttcagaaaggtgagattcagcttcgagcagcccgacggcagagcccagatgcccaccaccgagagagtgaccctgaccagatgcttctacctgttccccggccac

SEQ ID NO: 1396 - DNA, 993 bp, Artificial Sequence
  Synthetic: (Caspase-4, N.del + DM domain; P2015 without epitope tag)
atgagaatgaagcagctggaggacaagatcgaggagctgctgagcaagatctatcacctggagaacgagatcgccagactgaagaagctgatcggcgagagacagatcagccccaacaagaaggcccaccccaacatggaggccggaccgcctgagagcggcgagagcaccgacgccctgaagctgtgcccccacgaggagttcctgagactgtgcaaggagagagccgaggagatctaccccatcaaggagagaaacaacagaaccagactggccctgatcatctgcaacaccgagttcgaccacctgccccccagaaacggcgccgacttcgacatcaccggcatgaaggagctgctggagggcctggactacagcgtggacgtggaggagaacctgaccgccagagacatggagagcgccctgagagccttcgccaccagacccgagcacaagagcagcgacagcaccttcctggtgctgatgagccacggcatcctggagggcatctgcggcaccgtgcacgacgagaagaagcccgacgtgctgctgtacgacaccatcttccagatcttcaacaacagaaactgcctgagcctgaaggacaagcccaaggtgatcatcgtgcaggcctgcagaggcgccaacagaggcgagctgtgggtgagagacagccccgccagcctggaggtggccagcagccagagcagcgagaacctggaggaggacgccgtgtacaagacccacgtggagaaggacttcatcgccttctgcagcagcaccccccacaacgtgagctggagagacagcaccatgggcagcatcttcatcacccagctgataacctgcttccagaagtacagctggtgctgccacctggaggaggtgttcagaaaggtgcagcagagcttcgagacccccagagccaaggcccagatgcccaccatcgagagactgagcatgaccagatacttctacctgttccccggcaac

SEQ ID NO: 1397 - DNA, 2268 bp, Artificial Sequence
  Synthetic: Human constitutively active IKK beta (PEST mutation) P.4015 without epitope tag
atgtcgtggtccccctcacttactactcaaacttgcggcgcctgggaaatgaaggaaagactcggtaccgggggatttggaaacgtgatccggtggcacaaccaagaaaccggagagcaaattgcgatcaagcagtgtagacaggaactgagccctcggaacagagagcggtggtgcctggagattcagattatgcgccggctgacccatccgaacgtggtggctgccagggatgtcccggagggcatgcagaacctggcccctaacgacctcccactcctggccatggaatactgccagggtggcgatctgcggaagtaccttaaccaattcgaaaactgctgtggactcagggaaggggccattctgactctcttgtcggacatcgccagcgccctgagatacctccacgagaacagaatcatccatcgcgatctgaagccggagaacattgtgctgcaacagggcgaacagcggctgatccacaaaatcattgatctcggatatgccaaggaactggaccagggcgaactctgcaccgaattcgtgggcactctccagtacctggcacccgagttgctggagcagcagaagtacaccgtcaccgtcgactactggtccttcggaaccctcgcattcgaatgtatcactggcttccgccctttcctgcctaactggcagcctgtgcagtggcattcgaaggtccggcagaaatcggaggtggacatcgtggtgtccgaggatctgaacggcacagtgaagttctcctcctcactgccttaccccaacaacctcaactccgtgctggccgaacggctggaaaagtggctccagcttatgctgatgtggcatccacgccagcggggtactgatccgacctacggtccgaacgggtgcttcaaggccctggacgacatactgaacctcaagctcgtgcacatcctcaatatggtgaccggcacgatccatacttaccccgtcaccgaggacgaatcgttgcagtcactgaaggctcggatccagcaggacaccgggattcccgaagaggaccaggaacttctgcaggaagcgggactggcgttgatccccgacaagcctgccacccagtgcatctctgacgggaagctgaatgaaggtcacaccctggatatggaccttgtgttcctgttcgacaattccaagatcacctacgagactcagattagccctaggcctcagccggaatccgtgtcgtgcatcctgcaagaaccgaagcggaatctggcgttctttcaactgcggaaagtgtggggccaagtctggcacagcattcagacactgaaggaggattgcaaccggctgcagcaaggacagcgcgccgctatgatgaatctgctgcgcaacaattcctgcctctcaaaaatgaagaactccatggcctcgatgtcccagcaattgaaggccaagctggatttcttcaagacctcgatccagatcgacctggaaaagtacagcgagcagaccgagttcggaatcacctccgacaagctgctgttggcatggcgggagatggaacaagcggtggagctgtgcggacgcgaaaacgaggtcaaactgttggtggaaagaatgatggccctgcagaccgacatcgtggacctccagcgatcccctatgggccggaagcagggtggcaccctcgatgacctggaagaacaggctcgggagctgtacaggcgcctgcgggaaaagccgcgggaccagagaactgaaggggattcccaggagatggtgcgcctgctgcttcaagccatccagtcattcgaaaagaaggtccgcgtgatctacacccaactgagcaagactgtggtgtgcaagcagaaggccctcgaactgctgccgaaggtggaggaggtcgtgtccctgatgaacgaggacgaaaagacggtcgtgagactccaggaaaagagacagaaggaactgtggaaccttctcaagattgcctgctccaaagtgcgcggacctgtggctggagctcccgacgccatgaacgccgctagactcgcgcagcctggacagctcatggcccagcccgcaactgcagctaacgccctgcccgaaccagcgaagaaggcggaggagcttgtggcggaagcccacaacctgtgcaccctgctcgaaaacgccatccaggacactgtgcgggaacaagaccaatccttcaccgccctggattggtcatggctgcagactgaggaagaggagcactcctgtctggagcaagcctcg

SEQ ID NO: 1398 - DNA, 1440 bp, Artificial Sequence
  Synthetic: (hu-cFLIP-L; P1006 without epitope tag)
atgagcgccgaggtgatccaccaggtggaggaggccctggacaccgacgagaaggagatgctgctgttcctgtgcagagacgtggccatcgacgtggtgccccccaacgtgagagacctgctggacatcctgagagagagaggcaagctgagcgtgggcgacctggccgagctgctgtacagagtgagaagattcgacctgctgaagagaatcctgaagatggacagaaaggccgtggagacccacctgctgagaaacccccacctggtgagcgactacagagtgctgatggccgagatcggcgaggacctggacaagagcgacgtgagcagcctgatcttcctgatgaaggactacatgggcagaggcaagatcagcaaggagaagagcttcctggacctggtggtggagctggagaagctgaacctggtggcccccgaccagctggacctgctggagaagtgcctgaagaacatccacagaatcgacctgaagaccaagatccagaagtacaagcagagcgtgcagggcgccggcaccagctacagaaacgtgctgcaggccgccatccagaagagcctgaaggaccccagcaacaacttcagactgcacaacggcagaagcaaggagcagagactgaaggagcagctgggcgcccagcaggagcccgtgaagaagagcatccaggagagcgaggccttcctgccccagagcatccccgaggagagatacaagatgaagagcaagcccctgggcatctgcctgatcatcgactgcatcggcaacgagaccgagctgctgagagacaccttcaccagcctgggctacgaggtgcagaagttcctgcacctgagcatgcacggcatcagccagatcctgggccagttcgcctgcatgcccgagcacagagactacgacagcttcgtgtgcgtgctggtgagcagaggcggcagccagagcgtgtacggcgtggaccagacccacagcggcctgcccctgcaccacatcagaagaatgttcatgggcgacagctgcccctacctggccggcaagcccaagatgttcttcatccagaactacgtggtgagcgagggccagctggaggacagcagcctgctggaggtggacggccccgccatgaagaacgtggagttcaaggcccagaagagaggcctgtgcaccgtgcacagagaggccgacttcttctggagcctgtgcaccgccgacatgagcctgctggagcagagccacagcagccccagcctgtacctgcagtgcctgagccagaagctgagacaggagagaaagagacccctgctggacctgcacatcgagctgaacggctacatgtacgactggaacagcagagtgagcgccaaggagaagtactacgtgtggctgcagcacaccctgagaaagaagctgatcctgagctacacc

SEQ ID NO: 1399 - DNA, 681 bp, Artificial Sequence
  Synthetic: (hu-cFLIP-S(1-227); P1007 without epitope tag)
atgagcgccgaggtgatccaccaggtggaggaggccctggacaccgacgagaaggagatgctgctgttcctgtgcagagacgtggccatcgacgtggtgccccccaacgtgagagacctgctggacatcctgagagagagaggcaagctgagcgtgggcgacctggccgagctgctgtacagagtgagaagattcgacctgctgaagagaatcctgaagatggacagaaaggccgtggagacccacctgctgagaaacccccacctggtgagcgactacagagtgctgatggccgagatcggcgaggacctggacaagagcgacgtgagcagcctgatcttcctgatgaaggactacatgggcagaggcaagatcagcaaggagaagagcttcctggacctggtggtggagctggagaagctgaacctggtggcccccgaccagctggacctgctggagaagtgcctgaagaacatccacagaatcgacctgaagaccaagatccagaagtacaagcagagcgtgcagggcgccggcaccagctacagaaacgtgctgcaggccgccatccagaagagcctgaaggaccccagcaacaacttcagactgcacaacggcagaagcaaggagcagagactgaaggagcagctgggcgcccagcaggagcccgtgaagaagagc

SEQ ID NO: 1400 - DNA, 588 bp, Artificial Sequence
  Synthetic: (hu-cFLIP-p22(1-198); P1008 without epitope tag) - nucleotide
atgagcgccgaggtgatccaccaggtggaggaggccctggacaccgacgagaaggagatgctgctgttcctgtgcagagacgtggccatcgacgtggtgccccccaacgtgagagacctgctggacatcctgagagagagaggcaagctgagcgtgggcgacctggccgagctgctgtacagagtgagaagattcgacctgctgaagagaatcctgaagatggacagaaaggccgtggagacccacctgctgagaaacccccacctggtgagcgactacagagtgctgatggccgagatcggcgaggacctggacaagagcgacgtgagcagcctgatcttcctgatgaaggactacatgggcagaggcaagatcagcaaggagaagagcttcctggacctggtggtggagctggagaagctgaacctggtggcccccgaccagctggacctgctggagaagtgcctgaagaacatccacagaatcgacctgaagaccaagatccagaagtacaagcagagcgtgcagggcgccggcaccagctacagaaacgtgctgcaggccgccatccagaagagcctgaaggac

SEQ ID NO: 1401 - DNA, 1128 bp, Artificial Sequence
  Synthetic: (hu-cFLIP-p43(1-376); P1009 without epitope tag) - nucleotide
atgagcgccgaggtgatccaccaggtggaggaggccctggacaccgacgagaaggagatgctgctgttcctgtgcagagacgtggccatcgacgtggtgccccccaacgtgagagacctgctggacatcctgagagagagaggcaagctgagcgtgggcgacctggccgagctgctgtacagagtgagaagattcgacctgctgaagagaatcctgaagatggacagaaaggccgtggagacccacctgctgagaaacccccacctggtgagcgactacagagtgctgatggccgagatcggcgaggacctggacaagagcgacgtgagcagcctgatcttcctgatgaaggactacatgggcagaggcaagatcagcaaggagaagagcttcctggacctggtggtggagctggagaagctgaacctggtggcccccgaccagctggacctgctggagaagtgcctgaagaacatccacagaatcgacctgaagaccaagatccagaagtacaagcagagcgtgcagggcgccggcaccagctacagaaacgtgctgcaggccgccatccagaagagcctgaaggaccccagcaacaacttcagactgcacaacggcagaagcaaggagcagagactgaaggagcagctgggcgcccagcaggagcccgtgaagaagagcatccaggagagcgaggccttcctgccccagagcatccccgaggagagatacaagatgaagagcaagcccctgggcatctgcctgatcatcgactgcatcggcaacgagaccgagctgctgagagacaccttcaccagcctgggctacgaggtgcagaagttcctgcacctgagcatgcacggcatcagccagatcctgggccagttcgcctgcatgcccgagcacagagactacgacagcttcgtgtgcgtgctggtgagcagaggcggcagccagagcgtgtacggcgtggaccagacccacagcggcctgcccctgcaccacatcagaagaatgttcatgggcgacagctgcccctacctggccggcaagcccaagatgttcttcatccagaactacgtggtgagcgagggccagctggaggacagcagcctgctggaggtggac

SEQ ID NO: 1402 - DNA, 315 bp, Artificial Sequence
  Synthetic: (hu-cFLIP-p12(377-480); P1010 without epitope tag) - nucleotide
atgggccccgccatgaagaacgtggagttcaaggcccagaagagaggcctgtgcaccgtgcacagagaggccgacttcttctggagcctgtgcaccgccgacatgagcctgctggagcagagccacagcagccccagcctgtacctgcagtgcctgagccagaagctgagacaggagagaaagagacccctgctggacctgcacatcgagctgaacggctacatgtacgactggaacagcagagtgagcgccaaggagaagtactacgtgtggctgcagcacaccctgagaaagaagctgatcctgagctacacc

SEQ ID NO: 1403 - DNA, 1755 bp, Artificial Sequence
  Synthetic: (huRIPK1(1-555).IZ.TM; TH1021 without epitope tag) nucleotide
atgcagcccgacatgagcctgaacgtgatcaagatgaagagcagcgacttcctggaatcggccgagctggacagcggcggcttcggcaaggtgagcctgtgcttccacagaactcagggcctgatgatcatgaagaccgtgtacaagggccccaattgcatcgagcacaacgaggccttactggaggaggccaagatgatgaacagactgagacattcgagagtggtcaagttactgggcgtgatcatcgaggaaggcaagtacagcctggtgatggagtacatggaaaagggcaacctgatgcacgtgctgaaggccgagatgagcacccccctgagcgtgaagggcagaatcatcctggagattatcgaggggatgtgctacctgcacggcaagggcgtgatccacaaggacctgaagccggagaacatcctggtggacaacgacttccacatcaagatcgccgacctgggcctggccagctttaagatgtggagcaagctgaacaacgaggagcacaacgagttaagagaggtggacggcaccgccaagaagaacggcggcaccttatactacatggcccccgagcacctgaacgatgtgaacgccaagcccaccgagaagagcgacgtgtactcctttgccgtggtcctgtgggccatcttcgccaacaaggagccctacgagaacgccatttgcgagcagcagctgatcatgtgcattaagagcggcaacagacccgacgtggacgacatcaccgagtactgccccagagagattatcagcctgatgaagctgtgctgggaggccaaccccgaggctagacccaccttccctgggatcgaggagaaattcagacccttctacctgagccagctggaggagagcgtggaagaggacgtgaagagcctgaagaaagagtacagcaacgagaacgctgtggtgaagcgcatgcagagcctgcagctggactgcgtggccgtccccagcagcagaagcaacagtgccaccgagcagccgggctcgctgcactccagccagggcctgggcatgggccccgtggaggagagctggttcgccccctcgctggagcacccccaggaggagaacgaacctagcctgcagagcaagctgcaggacgaggccaactaccacctgtacggcagcagaatggacagacagaccaagcagcaaccaagacagaacgtggcctacaacagagaggaggaacgaagaagaagagtgagccacgaccccttcgcccagcagagaccctacgagaacttccagaacaccgagggcaagggcaccgcctatagcagcgccgccagccacggcaacgcagtgcaccagcccagcggcctgacctctcagccccaggtgctgtaccagaataatggcctgtatagcagccacggcttcggcaccagacccctggacccaggcaccgccggccctagagtgtggtacagacccatcccaagccacatgcccagcctgcacaacataccggtgcccgagacaaactacttgggcaacacccccaccatgcccttcagcagcctgccccccacagacgagagcatcaagtacaccatctataacagcaccggcatccagatcggcgcctacaactatatggagatcggcggtaccagcagcagcggcggcatcaagaaggagatagaggcaatcaagaaggagcaggaggccatcaagaagaagatcgaagccatcgagaaggagattgaggcc

SEQ ID NO: 1404 - DNA, 1827 bp, Artificial Sequence
  Synthetic: (huRIPK1(1-555).EE.DM; TH1022 without epitope tag) - nucleotide
atgcagcccgacatgagcctgaatgtgatcaagatgaagagcagcgacttcctggagagcgccgagctggatagcggcggattcggcaaggtgagcctgtgcttccacagaacccaaggcctgatgatcatgaagaccgtgtacaagggacccaactgcatcgagcacaacgaagccctgttagaggaagccaagatgatgaatagactgcgtcactctagggtggttaaactgctgggcgtgatcatcgaggagggcaagtacagcctggtgatggagtacatggagaagggcaaccttatgcacgtgctgaaggccgagatgtccacccccctgagcgtgaagggcagaatcatcctggagatcatcgagggaatgtgttatctgcatggcaagggcgtgatccacaaagacctgaagcccgagaacatcctggtggacaacgatttccacatcaagatcgccgacctgggcctggccagcttcaagatgtggagcaagctgaacaacgaggagcacaacgaactgagagaggtggatggcaccgccaagaaaaacggcggcaccctgtattacatggcccccgagcacctgaacgacgtgaacgccaagcccaccgagaagagcgacgtttacagctttgccgtggtgctgtgggccatcttcgccaacaaggagccctacgagaacgccatctgcgagcagcagctgatcatgtgcatcaagagcggcaacagacccgacgtggacgacatcaccgagtactgcccccgtgagatcattagcctgatgaagctgtgctgggaggccaaccccgaggccagacccaccttccccggcattgaggagaagttcagacccttctacctgagccagttagaggaaagcgtggaggaggacgtgaaaagcctgaagaaagagtactctaacgagaacgccgtggtgaaacgcatgcagagcctgcagctggattgcgtggccgtgcccagctccagaagcaacagcgccaccgaacaacctggcagcctgcacagctcccagggcctgggcatgggccccgtggaggagagctggttcgccccctccctggagcatccgcaggaggagaacgagccctctctgcagtccaagctgcaagacgaggccaactaccacctgtacggcagcagaatggacagacagaccaagcagcaacccagacaaaatgtggcctacaatagagaggaggagagaagaagaagagtgagccacgaccctttcgcccagcagagaccctacgagaacttccagaataccgagggcaagggtaccgcctacagctcagcggcctcgcacggcaacgccgtgcaccagcccagcggcctgaccagccagccccaggtgctgtaccaaaacaacggcctgtatagctcccacggctttggcaccagacccctggaccccggcaccgccggccccagagtctggtatagacccatccccagccatatgcctagcctgcacaacatccccgtgcccgagaccaactacctgggcaatacccccaccatgccgttcagcagcttaccccccaccgacgagagcatcaagtacaccatctacaacagcaccggcatccagatcggcgcctacaactacatggaaatcggcggaaccagcagcagcggcagcgacggcagcggctccggaagcggaagcataaccatcagggccgccttcctggagaaggaaaataccgcgctgagaacagagattgccgagttagaaaaggaggtgggcagatgcgagaacatagtgagcaagtacgagaccagatacggccccctg

SEQ ID NO: 1405 - DNA, 1827 bp, Artificial Sequence
  Synthetic: (huRIPK1(1-555).RR.DM; TH1023 without epitope tag) - nucleotide
atgcaacccgacatgagcttgaacgtgatcaagatgaagagcagcgatttcctggagagcgccgagctggacagcggcggcttcggcaaggtgagcctgtgtttccacagaacccagggcctgatgatcatgaagacagtgtacaagggccccaactgcatcgagcacaacgaggccctgctggaggaggctaagatgatgaacagactgagacacagcagagtcgtgaagctgctgggcgtgatcatcgaagagggcaagtacagcctggtgatggagtacatggagaaaggcaaccttatgcacgtgctcaaggccgagatgagcacccctctgagcgtgaagggaagaatcatcctggagatcatcgagggcatgtgctacctgcacggcaagggcgtcatccataaggacctgaagcccgagaatatccttgtggacaacgacttccatatcaagatcgccgacctcggcctggccagcttcaagatgtggagcaagctgaacaacgaggagcacaacgagctgagagaggtagacggcaccgccaagaaaaatggcggcaccctgtactacatggctcccgagcacctgaatgacgtgaacgccaagcctaccgaaaagagcgacgtgtatagcttcgccgtggtgctctgggccatcttcgccaacaaggagccttatgagaatgcaatctgcgagcagcagctgatcatgtgcatcaagagcggcaacagacccgacgtggacgacatcaccgaatactgccccagagagatcatcagcctgatgaagctgtgctgggaggccaaccccgaggccagacccaccttccccggcattgaggagaagttcagacccttctacctgagccagttggaagagagcgtggaggaggacgtcaaaagcctgaagaaggagtacagcaacgagaacgccgtcgtgaagagaatgcagagcctgcagctggactgcgtggccgtgcctagcagcagaagcaacagcgccaccgagcagcccggcagcctgcacagcagccagggccttggaatgggccccgtggaggaaagctggttcgcccccagccttgagcatccgcaggaggagaacgagcccagcctgcagagcaagctgcaggacgaagccaactatcacctgtacggcagcagaatggaccgacagaccaagcagcagcccagacagaacgtggcctataaccgagaggaggagagaagaagaagggtgagccacgaccccttcgcccaacagagaccctacgagaacttccagaacaccgagggcaagggcaccgcttacagtagcgccgcaagccacggcaacgccgtgcaccaacctagcggactgaccagccagccccaggtgctgtaccaaaacaacggtctgtacagctcacacggcttcgggaccagacccttagatcccggaaccgccggccccagagtatggtatagacccatccccagccacatgcccagcttgcacaacatccccgtgcccgagaccaactacctgggcaacacccccaccatgcccttcagcagcctgccccccaccgacgagagcatcaaatataccatctacaacagcaccggaatccagatcggggcctacaattacatggagatcggaggcaccagcagcagcggcagcgacggtagcggaagcggcagcggcagcctcgagatcagagccgccttcctggagaaggagaacaccgccctgagaaccagagccgccgaactgagaaagagagtgggcagatgcagaaacatcgtgagcaagtacgagaccagatacggccccctg

SEQ ID NO: 1406 - DNA, 1755 bp, Artificial Sequence
  Synthetic: (msRIPK1(1-555).IZ.TM; TH1024 without epitope tag) - nucleotide
atgcagcctgacatgagcctggacaatatcaagatggccagcagcgacctgctcgagaagaccgacctggacagtggcggcttcggaaaagtgagcctgtgctaccacaggtctcacgggttcgtgatcctgaagaaggtgtacaccggccccaacagagccgagtataatgaggtgctgctggaggagggcaagatgatgcacagactgagacatagcagagtggtgaagctgctgggcatcatcatcgaggagggaaactacagcctggttatggagtacatggagaagggcaacctaatgcacgtgttgaagacccagatagacgtgccactgagcttaaagggcagaatcatcgtggaggctatcgagggcatgtgctacctgcacgacaagggcgtgatccacaaagacctgaagcccgagaacatactcgtggatagagatttccacatcaagatcgccgacctgggcgtggccagcttcaagacttggagcaagctgacaaaggagaaggacaacaagcagaaggaggtgagcagcaccaccaagaaaaacaacggcggcaccctgtactacatggcccctgagcacctgaacgacatcaacgccaagcccaccgagaagagcgacgtgtatagcttcggcatcgtgctgtgggccatctttgctaagaaagagccctacgagaacgtgatctgcaccgagcagttcgtcatctgcatcaagagcggcaacagacccaatgtggaggagatcctggaatactgccccagagagatcatcagcctcatggagagatgctggcaggccatccctgaggacagacccaccttcctgggcattgaggaggagttcagacccttctacctgagccacttcgaggagtacgtggaggaggacgtggccagtctgaaaaaggagtatccagaccagagccccgtgctgcagagaatgttcagcctgcagcacgactgtgtgcccctgccccccagcagaagcaacagcgagcagccgggcagcctgcacagcagccagggcttacaaatgggacccgtggaggagagctggttcagcagtagccccgagtacccccaggacgagaacgacaggtcggtccaggccaagctccaggaagaggccagctaccacgccttcggcatcttcgccgagaagcaaaccaagccccagcccagacaaaacgaagcctacaacagagaggaagagagaaagagacgcgtaagccacgacccctttgcccaacagagagccagagaaaacatcaagagcgccggcgcccggggccactcggatccgagcaccactagcagaggcatcgctgtgcagcaactcagctggcccgccacccagaccgtgtggaacaacggcctgtacaaccagcacggcttcggcaccaccggcaccggcgtttggtacccccccaacctgtcgcagatgtacagcacctacaaaacccccgtgcccgagaccaacatccccggcagcacccccaccatgccctatttcagcggccccgtggccgacgacctgatcaagtacaccatcttcaacagcagcggcatccagatcggcaaccacaattacatggacgtgggcctgaacagccagccacccaacaacacctgcaaggaagaaagcaccagcggcggcatcaagaaggaaatcgaggccatcaagaaggagcaggaagccataaagaagaaaatcgaggccatcgagaaggagatcgaggcc

SEQ ID NO: 1407 - DNA, 1827 bp, Artificial Sequence
  Synthetic: (msRIPK1(1-555).EE.DM; TH1025 without epitope tag) - nucleotide
atgcagcccgacatgagcctggacaacattaagatggccagtagcgacctgctggagaagaccgacctggatagcgggggcttcggcaaggtgagcctgtgctaccacagaagccacggattcgtgatcctgaagaaggtgtacaccggccccaacagagccgagtacaacgaggtgctgctggaggagggcaagatgatgcatagactgagacacagcagagtggtgaaactgctggggatcatcatcgaagagggcaactatagcctggtgatggaatacatggagaagggcaacctgatgcacgtgctgaagacccagatcgacgtgcccctgagcctgaagggcagaatcatcgtggaggccatcgagggtatgtgctacctgcacgataagggcgtgatccacaaggacctgaaacctgaaaacatcttagtggacagagacttccacatcaagatcgccgacctgggagtggctagcttcaagacctggagcaaactgaccaaggagaaggataacaagcagaaggaagtgagcagcaccaccaagaaaaacaacggaggcaccctgtactacatggcccccgagcatctgaacgacatcaacgccaagcccaccgagaagagcgacgtgtactccttcggcatcgtcttatgggccatcttcgccaagaaggagccctacgagaacgtgatctgcaccgaacagtttgtgatctgcatcaagagcggcaatagacccaacgtggaggagatcctggagtactgccccagagagatcatcagcctgatggagaggtgctggcaggctatccccgaggacagacccacctttctgggcatcgaggaagagttcagacccttctatctgagccacttcgaggagtatgttgaggaggacgtggccagcctgaagaaggagtaccccgaccagagccccgtgctgcagagaatgttcagcctgcaacacgattgcgtgccgctgccccccagcagatcgaatagcgagcagccaggcagcctacacagcagtcagggcctgcagatgggccccgtggaggaaagctggttcagcagcagccccgagtacccccaggacgagaatgacagaagcgtgcaagcaaagctgcaagaggaggccagctaccacgccttcggcatcttcgccgagaaacagactaagccccagcccagacagaacgaggcctacaacagagaggaggagagaaaaagacgagtgagccacgaccccttcgcccagcagagagccagagagaatatcaagagcgccggcgccagaggccacagcgaccccagcaccaccagcagaggaatcgccgtgcagcagctgagctggcccgccacccagaccgtgtggaacaacggcctgtacaaccagcacggctttggcaccaccggcaccggcgtgtggtatccccccaacctgagccagatgtacagcacctataaaacccctgtgccggagaccaatatccccggcagcacccctaccatgccctacttcagcggccccgtggccgacgacctgatcaagtacacgatcttcaacagcagcggcatccagataggcaaccacaactacatggacgtgggcctgaacagccaaccccccaataacacctgcaaggaggagtccaccagcggcagcgacggcagcggcagcggcagcggcagcataaccatcagagctgctttcctggagaaggagaacaccgctctgagaaccgagatcgccgagctggagaaggaggtcggcagatgcgagaatatcgtgagcaagtacgagaccagatacggacccctg

SEQ ID NO: 1408 - DNA, 1827 bp, Artificial Sequence
  Synthetic: (msRIPK1(1-555).RR.DM; TH1026 without epitope tag) - nucleotide
atgcagcctgatatgagcctggacaacatcaagatggccagcagcgacttgctggagaagaccgatctggactccggcggctttggcaaggtgagcctgtgttaccacagaagccacggcttcgtgatcctgaaaaaggtgtacaccggccccaatagagcagagtacaacgaggtgctgctggaggagggcaagatgatgcacagactgaggcatagcagagtggtgaaactgctgggcatcatcattgaggagggcaactacagcctggtgatggagtacatggagaagggcaacctgatgcatgtgctgaagacccaaatcgacgtgcccctgtcgctgaagggcagaatcatcgtggaggccatcgaggggatgtgctacctgcacgacaagggcgtgatccacaaggacctgaagcccgagaacatcctggtggatagagacttccacatcaagatcgccgacctgggcgttgccagcttcaagacctggtctaaactgaccaaggagaaagacaacaagcagaaggaggtgagcagcaccaccaagaagaacaacggcggaacactgtactatatggcccctgagcacctgaacgacatcaacgccaagcccaccgagaaaagcgatgtttacagcttcggcatcgtgctgtgggccatcttcgccaagaaggagccctacgagaacgtgatctgcaccgagcagttcgtgatctgcatcaagagcggcaacagacccaacgtggaggaaatcctggagtactgccccagagagatcatcagcctgatggagagatgctggcaggccatccccgaggaccgtcccacgttcctgggcatcgaagaggagttccggcccttctacctgagccatttcgaggagtatgtggaggaggacgtggccagcctgaagaaggagtaccccgaccagagcccagtgctgcagagaatgttcagccttcaacacgactgcgtgcccctgcctccctcaagaagcaacagcgagcagcccggcagcttgcacagcagccagggcctgcagatgggccccgtggaggagagctggtttagcagcagccccgagtacccccaggacgagaatgacagaagcgtgcaagccaagttacaggaggaggccagctaccacgcctttggaatcttcgccgagaagcagaccaagccccagcccagacagaacgaggcctacaacagagaggaggagagaaaaagaagagtgagccacgaccccttcgcccagcagagagccagagagaacattaagagcgccggcgcgagaggccacagcgaccccagcaccacaagcagaggcatcgccgtgcagcaattgagctggcccgccacccagaccgtgtggaacaacggcctgtataaccagcacggcttcggaaccaccggcaccggcgtgtggtacccccccaatctgagccagatgtacagcacttacaagacccccgtgcccgaaaccaacatccccggcagcacccccaccatgccctacttcagcggccccgtggccgacgacctcatcaagtacacaatatttaacagcagcggcatccagatcggcaaccacaactacatggacgtgggcctgaacagccagcccccgaacaatacctgcaaggaggagagcacaagcggctctgacggcagcggcagcggcagcggctcactggagatcagagctgccttcctggaaaaggagaacaccgctctgagaaccagagccgccgagctgcgaaagagagtaggcagatgcagaaacatcgtgagcaagtacgagaccagatacggtcccctg

SEQ ID NO: 1409 - DNA, 888 bp, Artificial Sequence
  Synthetic: (human myd88(L265P); P4027 without epitope tag) - nucleotide
atgagcgccggcgaccccagagtgggcagcggcagcctggacagcttcatgttcagcatccccctggtggccctgaacgtgggcgtgagaagaagactgagcctgttcctgaaccccagaacccccgtggccgccgactggaccctgctggccgaggagatgggcttcgagtacctggagatcagagagctggagaccagacccgaccccaccagaagcctgctggacgcctggcagggcagaagcggcgccagcgtgggcagactgctggagctgctggccctgctggacagagaggacatcctgaaggagctgaagagcagaatcgaggaggactgccagaagtacctgggcaagcagcagaaccaggagagcgagaagcccctgcaggtggccagagtggagagcagcgtgccccagaccaaggagctgggcggcatcaccaccctggacgaccccctgggccagacccccgagctgttcgacgccttcatctgctactgccccaacgacatcgagttcgtgcaggagatgatcagacagctggagcagaccgactacagactgaagctgtgcgtgagcgacagagacgtgctgcccggcacctgcgtgtggagcatcgccagcgagctgatcgagaagagatgcagaagaatggtggtggtggtgagcgacgactacctgcagagcaaggagtgcgacttccagaccaagttcgccctgagcctgagccccggcgtgcagcagaagagacccatccccatcaagtacaaggccatgaagaaggacttccccagcatcctgagattcatcaccatctgcgactacaccaacccctgcaccaagagctggttctggaccagactggccaaggccctgagcctgccc

SEQ ID NO: 1410 - DNA, 696 bp, Artificial Sequence
  Synthetic: (Mouse TRAM (TICAM2); P4033 without epitope tag) - nucleotide
atgggcgtgggcaagagcaagctggacaagtgccccctgagctggcacaagaaggacagcgtggacgccgaccaggacggccacgagagcgacagcaagaacagcgaggaggcctgcctgagaggcttcgtggagcagagcagcggcagcgagccccccaccggcgagcaggaccagcccgaggccaagggcgccggccccgaggagcaggacgaggaggagttcctgaagttcgtgatcctgcacgccgaggacgacaccgacgaggccctgagagtgcaggacctgctgcagaacgacttcggcatcagacccggcatcgtgttcgccgagatgccctgcggcagactgcacctgcagaacctggacgacgccgtgaacggcagcgcctggaccatcctgctgctgaccgagaacttcctgagagacacctggtgcaacttccagttctacaccagcctgatgaacagcgtgagcagacagcacaagtacaacagcgtgatccccatgagacccctgaacagccccctgcccagagagagaacccccctggccctgcagaccatcaacgccctggaggaggagagccagggcttcagcacccaggtggagagaatcttcagagagagcgtgttcgagagacagcagagcatctggaaggagaccagaagcgtgagccagaagcagttcatcgcc

SEQ ID NO: 1411 - DNA, 1134 bp, Artificial Sequence
  Synthetic: (human TAK1-TAB1; P4031 without epitope tag) - nucleotide
atgagcaccgccagcgccgccagctcaagctcctcctctagcgccggcgagatgatcgaggcccccagccaggtgctgaacttcgaggagatcgactacaaggaaatcgaggtggaggaggtggtgggcagaggcgccttcggcgtggtgtgcaaggccaagtggagagccaaggacgtggccatcaagcagatcgagagcgagtccgagagaaaggccttcatcgtggagctgagacagctgagcagagtgaaccaccccaacatcgtgaagctgtacggcgcctgcctgaaccccgtgtgcctggtgatggagtacgccgagggcggcagcctgtacaacgtgctgcacggcgccgagcccctgccctactacaccgccgcccacgccatgagctggtgcctgcagtgcagccagggcgtggcctacctgcacagcatgcagcccaaggccctgatccaccgcgatctgaagccccccaacctgctgctggtggccggcggcaccgtgctgaagatctgcgacttcggcaccgcctgcgacatccagacccacatgaccaacaacaagggatcagctgcgtggatggcccccgaggtgttcgagggcagcaactacagcgagaagtgcgacgtgttcagctggggcatcatcctgtgggaggtgatcaccagaagaaagcccttcgacgagatcggcggccccgccttcagaatcatgtgggccgtgcacaacggcaccagaccgccgctgatcaagaacctgcccaagcccatcgagtccctgatgaccagatgctggagcaaggacccgagccagaggcccagcatggaagagatcgttaagatcatgacccacctgatgagatacttcccgggcgccgatgaaccgctgcagtacccctgccaggagttcggcggaggcggcggccagagccccaccctgaccctgcagagcaccaacacccacacccagagcagcagcagtagcagcgacggcggcctgttcagaagcagacccgcccacagcctgccccccggcgaggacggcagagtggagccctacgtggacttcgccgagttctacagactgtggagcgtggaccacggcgagcagagcgtggtgaccgccccc

SEQ ID NO: 1412 - DNA, 537 bp, Artificial Sequence
  Synthetic: (human MLKL(1-180) ORF nucleotide sequence; no epitope tag)
atggagaacctgaagcacatcatcaccctgggccaggtgatccacaagagatgcgaggagatgaagtactgcaagaagcagtgcagaagactgggccacagagtgctgggcctgatcaagcccctggagatgctgcaggaccagggcaagagaagcgtgcccagcgagaagctgaccaccgccatgaacagattcaaggccgccctggaggaggccaacggcgagatcgagaagttcagcaacagaagcaacatctgcagattcctgaccgccagccaggacaagatcctgttcaaggacgtgaacagaaagctgagcgacgtgtggaaggagctgagcctgctgctgcaggtggagcagagaatgcccgtgagccccatcagccagggcgccagctgggcccaggaggaccagcaggacgccgacgaggacagaagagccttccagatgctgagaagagacaacgagaagatcgaggccagcctgagaagactggagatcaacatgaaggagatcaaggagaccctgagacagtac

SEQ ID NO: 1413 - DNA, 2187 bp, Artificial Sequence
  Synthetic: (CA-hMAVS ORF nucleotide sequence; no epitope tag)
atggagcacgaccttgagagaggccctccgggccctagaagacctcctcgaggtcctccacttagcagcagcttgggcctcgctctcttattgttgctacttgccttgttgttctggttgtacatcgtgatgagcgactggaccggcggcgcccttctggtgctgtacagcttcgccctgatgctgatcattatcatactgattatcttcatattcagaagagatctgctgtgccctctgggcgccttatgcattctgcttttgatgatcactctgctcctcatcgcactctggaacctgcacggccaggccctgttcctgggcatcgtgctgttcatcttcggctgcctcctcgtgcttggaatctggatctacctgctggagatgctgtggagactaggtgccaccatctggcagctgctggccttcttcctggcattcttcttagacctgattctgctcattattgccctatacctgcagcagaactggtggaccctactcgttgatctcctgtggctactgctgttccttgctatcctgatttggatgtactaccacggacaaagacctttcgccgaggacaagacctacaagtacatctgcagaaacttcagcaacttctgcaacgtggacgtggtggagatcctgccttacctgccttgcctgaccgccagggaccaggacagactgagagccacctgcaccctgagcggcaacagagacaccctgtggcacctgttcaacaccctgcagaggcgccctggctgggtggagtacttcatcgccgccctgagaggctgcgagttggttgacctcgccgacgaggtggccagcgtgtaccagagctaccagcctagaaccagcgacaggccgcctgaccctctggagcctcctagcctgcctgccgaacggcctggcccacctacccctgccgccgcccacagcatcccttacaactcctgtcgggagaaggagcctagctaccctatgcctgtgcaggaaacgcaggccccagaaagtcctggcgagaacagcgagcaggccttgcagactctgagccctagagccatccctagaaaccctgacggcggtcctctcgagagttccagcgacctggctgcactctccccactgaccagcagcggccaccaggagcaggacaccgagctgggcagcacccacaccgccggcgctacctcaagccttacccctagccggggcccagtcagccctagcgtgagcttccagcctctggccagaagcacaccaagagccagcagacttccaggaccaaccggcagcgtggtgagcaccggcaccagcttcagttcctctagcccaggcttagccagcgccggagcggccgagggcaagcagggcgccgagagcgaccaggccgagcctatcatctgttcctcgggtgccgaggcccctgccaacagcctacctagcaaggtgcctaccacactgatgccagttaacaccgtggccctgaaggttccagccaaccctgcttccgtttctacagtgccgtccaagctgccgacgtcatccaagcctccgggagccgtgccatctaacgccctgaccaatccagctccaagcaagctcccaatcaacagcaccagagccggcatggtgccttcaaaggtgccgacctccatggtgctgaccaaggtgagcgcctctaccgtgccaaccgacggatcttctcggaacgaggagacacctgctgctcctactccagcgggcgcaactggaggctcctcggcttggctggacagttctagcgagaatagaggcctgggtagtgagctgagtaagccgggcgtgctcgcaagccaggtggacagccctttcagcggctgcttcgaagaccttgcaatttccgcatctaccagtctaggcatgggcccttgccacggccctgaggagaacgagtacaagagcgagggcaccttcggcatccacgtggccgagaaccctagcatccagctgcttgagggcaatcctggaccaccagccgatcctgatggcggacctagacctcaggccgacagaaagttccaggagagagaggtgccttgtcatagaccttccccaggcgctctttggctgcaggtggccgtgaccggtgtcctcgtcgtgacattactggtggtgctctacagaagaagactgcac

SEQ ID NO: 1414 - DNA, 2268 bp, Artificial Sequence
  Synthetic: (huIKK2ca(S177E/S181E); P4005 without epitope tag) nucleotide
atgagctggtccccaagcctcacgacccagacctgcggcgcttgggagatgaaggagagactgggcacggggggctttggcaacgtgatcagatggcataatcaggaaaccggagagcagattgctatcaagcagtgtagacaggagctaagcccccgcaatagagagaggtggtgcctggaaattcagattatgagaagactgacccatcccaatgtggtcgccgcaagagacgtccccgaaggcatgcagaacctggcccccaatgacctgcctcttctggccatggaatactgccagggcggcgacctgcggaagtacctgaatcagtttgaaaattgctgcggcctgagagagggcgccatattgacactgctgagcgacatcgccagcgccctgagatacctgcacgagaacagaataattcacagagacctgaagccggagaatattgtgctgcagcagggtgaacagaggctcatccataagatcatcgacctggggtacgccaaggagctggatcagggcgagctgtgtaccgagtttgtggggactctgcaatacctggcccccgagctcctggaacagcagaagtacaccgtcacagtggattattggagcttcggcacgctggccttcgagtgcatcacgggctttaggccgtttctgcccaattggcagcccgtgcaatggcacagcaaggtcagacagaaaagcgaggtcgacatcgtagtgagcgaagacctgaacggcactgtcaagttcagtagctccctcccctaccctaacaatctgaacagcgtgctggcagagcggctggagaagtggctacaactaatgctgatgtggcacccccgacagcgtggcaccgaccccacctacgggcccaacggatgcttcaaggccctggacgacattctcaacctgaagctggtgcacatcttgaatatggtgaccggcaccatccacacctaccccgtgaccgaagacgaaagcttgcagagcctgaaggccagaattcaacaggacacaggcatccccgaagaggatcaagagctgctgcaggaagccggcctggctttgattcccgacaaaccagccacccagtgcattagcgacggcaagctgaacgagggccacaccctggacatggacctggtgttcctgttcgacaacagcaagattacctacgagacccaaatcagcccaaggccccaacccgagagcgtgagctgcatcctgcaagagcccaagaggaatctggccttcttccaactaagaaaggtgtggggccaagtgtggcacagcatccagactctgaaggaagactgcaatagactgcaacaaggacagcgagccgccatgatgaacctgttaagaaacaacagctgcttatctaagatgaagaacagcatggcctccatgagccagcagctgaaagccaaactggatttcttcaagaccagcatccagatcgacctggagaagtacagcgagcagacggagttcgggatcaccagcgacaagctgctgctggcttggagggaaatggaacaggccgtggagctgtgcggcagagagaacgaggttaaactgctggtagagcggatgatggccctgcagaccgacattgtagacctccagagaagccctatgggaagaaaacagggcggaacactggacgacctggaggagcaggctagagagctgtacagaagacttagagagaagcccagagaccaaagaaccgagggcgacagccaggagatggtgagactgctgctacaggctattcaaagtttcgagaagaaagtgagagtgatctacacccaactcagcaaaaccgtggtgtgtaagcagaaggccctggagctgctgcccaaggttgaggaggttgtcagcctgatgaatgaggatgagaagaccgtggtgagactgcaagagaaaaggcagaaagaactgtggaaccttttaaagattgcctgcagcaaggtgaggggccctgtatcaggatcccccgactctatgaacgccagcagactgagccagcccggtcaactgatgagccagccctctaccgccagcaactccctgcccgagccagccaagaagagcgaggaactggtggccgaggcccacaatctgtgcaccctactggagaacgccattcaggacaccgttcgcgagcaggaccagagcttcaccgccctggactggagctggctgcagactgaggaggaagagcacagctgcctggagcaggccagc

SEQ ID NO: 1415 - DNA, 1548 bp, Artificial Sequence
  Synthetic: (muRIPK3-IZ.Trimer; TH1015 with no epitope tag) - nucleotide
atgagcagcgtgaagctctggcccaccggcgccagcgccgtgcccctagtgagccgggaggagcttaagaagctcgagttcgtgggcaagggcggcttcggcgtggtgttccgggcccaccaccggacctggaaccacgacgtggccgtgaagatcgtgaacagcaagaagatcagctgggaggtgaaggccatggtgaacctgcggaacgagaacgtgttgctgctgctgggcgtgaccgaggacctgcagtgggacttcgtgagcggccaggccttggttacccggttcatggagaacggcagcctggccggcctgctgcagcccgagtgcccccggccctggcccctgctgtgccggctactgcaggaggtggtgctgggcatgtgctacctgcacagcctgaaccccccacttctgcaccgggacctgaagcccagcaacatcctgctggaccccgagctgcacgccaagctggccgacttcggcctgagcaccttccagggcggcagccagagcggctccggatctggcagcggaagccgggacagcggcggcaccctggcctacctggacccagagctgctgttcgacgtgaacctcaaggccagcaaggcctccgacgtgtacagcttcggcatcctggtgtgggccgtgctggctggaagggaggccgagctggtggacaagaccagcctgatccgggagacagtgtgcgaccggcagagccggcctcctctcaccgaactgccccccggcagccccgagactcctggcctggagaagctgaaggagctcatgatccactgctggggctcccagagcgagaaccggcccagcttccaggactgcgagcccaagaccaacgaggtgtacaacctggtgaaggacaaggtggacgccgccgtgagcgaggtcaagcactacctgagccagcaccggagcagcggccggaacctgagcgcccgggagcccagccagcggggcaccgagatggactgtcctcgcgagacaatggtgagcaagatgctggatcggctgcacctggaggagccttcaggccccgtgcccggcaagtgtcctgagagacaggcccaggacaccagcgtgggccctgccacccctgcacggaccagcagcgaccccgtggccggcaccccccagatcccccacaccctgcccttcagaggcaccactccaggcccggtgttcacggagacacctggaccacacccccagcggaaccagggcgacggtagacacggcacaccatggtacccatggacacctcctaaccccatgaccggtccacctgccctggtgttcaacaactgcagcgaggtgcagatcggcaactacaacagcctggtggcccctcctaggaccaccgccagcagcagcgccaagtacgatcaggcacagttcggccggggcagaggttggcagcccttccacaagggaggaatcaagaaggagatcgaggccattaagaaggaacaggaagctataaagaagaagattgaagctatcgagaaggaaattgaggcc

SEQ ID NO: 1416 - DNA, 585 bp, Artificial Sequence
  Synthetic: (Diablo.3; TH2003 without epitope tag) - nucleotide
atggccgctctgaagtcatggctctcaagaagtgtgaccagcttcttcaggtataggcagtgcctgtgcgtgccggtcgttgctaactttaaaaaacgctgtttcagcgagctgattcgcccatggcacaaaaccgtgaccatcgggttcggagtcacactgtgcgctgtcccaatcgcacaagctgtgtatacgcttacctcactttacagacagtacacatctttgctgggaaagatgaattctgaggaggaagacgaggtgtggcaagttattattggcgccagagccgaaatgacatcgaagcatcaggaatacctgaaacttgagaccacatggatgacggcagtcggactctccgagatggcagccgaagcagcctaccagacaggtgccgaccaggctagcatcacagctcggaaccatatccaattggtaaagctgcaggtcgaagaggtccaccaactaagccgaaaagccgaaaccaaactggctgaagcccagattgaagaactgcggcaaaaaacccaggaagagggcgaggagcgagccgaatctgagcaagaagcttatctgcgggaagat

SEQ ID NO: 1417 - DNA, 786 bp, Artificial Sequence
  Synthetic: (Myr(Lck)-IZ-L-msFADD; TH3002 without epitope tag) - nucleotide
atgggctgcgtgtgcagcagcaaccccgaggacgactggatggagaacggcggcatcaagaaggagatagaagccattaagaaagagcaggaggccatcaagaagaagatcgaggccatcgagaaggagatcgaagccggcagcggcggcggcagcggcagtggcggcggcagcgaccccttcctggtgctgctgcacagcttaagcggcagcctgagcggcaacgacctgatggagctgaagttcctgtgtagagagagagtgagcaagagaaagctggagagagtgcagagcggcctggacctgttcaccgtgctgctggagcagaacgacctggaaagaggccacaccggcttgctgagagagttgctggcctcactgagaagacacgatctgctgcagagactggacgacttcgaggccggcaccgccaccgccgccccccccggagaagccgacctgcaggtggccttcgacatcgtgtgcgacaacgtgggcagagactggaagagattggccagagagctgaaggtgagcgaggccaagatggacggcatcgaggagaagtaccccagaagcctgagcgagagagtgagagagagcctgaaggtgtggaagaacgccgagaagaagaacgccagcgtggctgggctggtgaaggccctgagaacctgcagactgaacctggtggccgatctggtggaggaggcccaggagagcgtgagcaagagcgagaacatgagccccgtgctgagagacagcaccgtgagtagcagcgagaccccc

SEQ ID NO: 1418 - DNA, 501 bp, Artificial Sequence
  Synthetic: (Myr(Lck)-IZ-L-huFADD-DD; TH3003 without epitope tag) - nucleotide
atgggctgcgtgtgcagcagcaaccccgaggacgactggatggagaacggcggcatcaaaaaggagatcgaggccatcaagaaggagcaggaggccatcaagaagaagatcgaggccatcgagaaagagatagaggccggcagcggcggcggcagcggcagcggcggcggcagccccggcgaggaggacctgtgcgccgccttcaacgtgatctgcgacaacgtgggcaaggactggagaagactggccagacagctgaaggtgagcgacaccaagatcgacagcatcgaggacagataccccagaaacctgaccgagagagtgagagagagcctgagaatctggaagaacaccgagaaggagaacgccaccgtggcccacctggtgggcgccctgagaagctgccagatgaacctggtggccgacctggtgcaggaggtgcagcaggccagagacctgcagaacagaagcggcgccatgagccccatgagctggaacagc

SEQ ID NO: 1419 - DNA, 504 bp, Artificial Sequence
  Synthetic: (Myr(Lck)-IZ-L-msFADD-DD; TH3004 without epitope tag) - nucleotide
atgggctgcgtgtgcagcagcaaccccgaggacgactggatggagaacggcggcatcaagaaagagatcgaggccatcaaaaaggagcaggaggccatcaagaagaagatcgaggccatcgagaaggagatcgaggccggctctggcggcggcagcggcagcggcggcggcagcccccccggcgaggccgacttacaggtggccttcgacatcgtgtgcgacaacgtgggcagagactggaagagactggccagagagctgaaggtgagcgaggccaagatggacggcatcgaggagaagtaccccagaagcctgagcgagagagtgagagagagcctgaaggtgtggaagaacgccgagaagaagaacgccagcgtggccggcctggtgaaggccctgagaacctgcagactgaacctggtggccgacctggtggaggaggcccaggagagcgtgagcaagagcgagaacatgagccccgtgctgagagacagcaccgtgagc

SEQ ID NO: 1420 - DNA, 795 bp, Artificial Sequence
  Synthetic: (Myr(MMSV)-IZ-L-huFADD; TH3005 without epitope tag) - nucleotide
atgggccagaccgtgaccacccccctgagcctcaccctggatcactggggcggcatcaagaaagagatcgaggccatcaagaaggagcaggaggccatcaagaagaagatcgaagccatcgagaaggagatcgaggccggcagcggcggcggcagcggcagcggcggcggcagcgaccccttcctggtgctgctgcacagcgtgtccagcagcctgagcagcagcgagctgaccgagctgaagttcctgtgcctgggcagagtgggcaaaagaaagctggagagagtgcagagcggcctggacctcttcagcatgctgctggagcagaacgacttggagcccggccacaccgagctgctgagagagctgctggccagcctgcggagacacgacctgctgagaagagtggatgacttcgaggccggcgccgccgccggcgccgcccccggcgaggaggacctgtgcgccgccttcaacgtgatctgcgacaacgtgggcaaggattggagaagattagccagacagctgaaggtgagtgacaccaagattgacagcatcgaggacagataccccagaaacctgaccgagagagtcagagagagcctgagaatctggaagaataccgagaaggagaacgccaccgtggcccacctggtgggcgccctgagaagctgccagatgaacctggtggccgacctggtgcaggaggtgcagcaggccagagacctgcagaacagaagcggcgccatgagccccatgagctggaacagcgacgccagcaccagcgaggccagc

SEQ ID NO: 1421 - DNA, 786 bp, Artificial Sequence
  Synthetic: (Myr(MMSV)-IZ-L-msFADD; TH3006 without epitope tag) - nucleotide
atgggccagacagtgaccacccccctgtccctgaccttggaccactggggcggcatcaagaaggagatcgaggccatcaagaaggagcaggaggccatcaaaaagaagatcgaagccattgagaaggagatcgaggccggaagcgggggcggcagcggcagcggcggaggaagcgaccccttcctggtgctgctgcatagcctgtcaggcagcctgagcggcaacgatctgatggagctgaagttcctgtgccgcgagagagtgagcaagagaaagctggagagagtacagagcggcctggacctgttcaccgtgctgctggagcagaatgacctggagagaggccacaccggcttgctgagagagttgctggccagcctgagaaggcacgacctgctgcagagactggacgacttcgaggccggcaccgccaccgccgccccccccggcgaagcggacctgcaggtggccttcgacatcgtgtgcgacaacgtgggcagagactggaagagactggccagagaactgaaggtgagcgaggccaaaatggacggcatcgaggagaagtaccccagaagcctgagcgagagagtgagagagagcctgaaggtgtggaagaacgccgagaagaagaacgccagcgtggccggcctggtgaaggccctgagaacatgcagactgaacctggtggccgatcttgtggaggaggcccaggagagcgtgagcaagagcgaaaacatgagccccgtgctgagagacagcaccgtgagcagcagcgagaccccc

SEQ ID NO: 1422 - DNA, 501 bp, Artificial Sequence
  Synthetic: (Myr(MMSV)-IZ-L-huFADD-DD; TH3007 without epitope tag) nucleotide
atgggccagaccgtgaccacccccctgagcctgaccctggaccactggggcggcatcaagaaggagatcgaggccatcaagaaggagcaggaggccatcaagaagaagattgaggctatcgagaaggagatcgaggccggcagcggcggcggcagcggcagcggcggcggcagccccggcgaggaggacctgtgcgccgccttcaacgtgatctgcgacaacgtgggcaaggactggagaagactggccagacagctgaaggtgagcgacaccaagatcgacagcatcgaggacagataccccagaaacctgaccgagagagtgagagagagcctgagaatctggaagaacaccgagaaggagaacgccaccgtggcccacctggtgggcgccctgagaagctgccagatgaacctggtggccgacctggtgcaggaggtgcagcaggccagagacctgcagaacagaagcggcgccatgagccccatgagctggaacagc

SEQ ID NO: 1423 - RNA, 92 nt, Artificial Sequence
  Synthetic: (5 UTR)
ucaagcuuuuggacccucguacagaagcuaauacgacucacuauagggaaauaagagagaaaagaagaguaagaagaaauauaagagccacc

SEQ ID NO: 1424 - RNA, 119 nt, Artificial Sequence
  Synthetic: (3 UTR)
ugauaauaggcuggagccucgguggccaugcuucuugccccuugggccuccccccagccccuccuccccuuccugcacccguacccccguggucuuugaauaaagucugagugggcggc

SEQ ID NO: 1425 - RNA, 164 nt, Artificial Sequence
  Synthetic: (3 UTR with mi-122 and mi-142-3p sites)
ugauaauaggcuggagccucgguggccaugcuucuugccccuugggcccaaacaccauugucacacuccauccccccagccccuccuccccuuccuccauaaaguaggaaacacuacaugcacccguacccccguggucuuugaauaaagucugagugggcggc

SEQ ID NO: 1426 - RNA, 66 nt, Artificial Sequence
  Synthetic: (Nucleotide sequence encoding 2A peptide)
ggaagcggagcuacuaacuucagccugcugaagcaggcuggagacguggaggagaacccuggaccu

SEQ ID NO: 1427 - RNA, 108 nt, Artificial Sequence
  Synthetic: (Nucleotide sequence encoding 2A peptide)
uccggacucagauccggggaucucaaaauugucgcuccugucaaacaaacucuuaacuuugauuuacucaaacuggcuggggauguagaaagcaauccagguccacuc

SEQ ID NO: 1428 - RNA, 2232 nt, Artificial Sequence
  Synthetic: Human constitutively active IKK alpha (PEST mutation) P.4013/4014 without epitope tag - nucleotide
auggaacgccccccuggacugaggccuggagcaggaggacccugggaaaugcgcgaacggcuggguacuggugguuucggcaacgugugccucuaccagcaucgggaguuggaccugaagaucgccaucaaguccugccgccuggagcugucgaccaagaaccgggaacgcuggugucaugaaauccagauuaugaaaaagcugaaccacgcuaacguggucaaagcuugcgacgugcccgaagaacugaauauccugauccacgaugugccccuccucgcaauggaguacugcagcggaggcgaucuccggaagcugcucaacaagccggagaacugcuguggccuuaaagagagccagauucugagccuucugucggacaucggcucggguauccgauaucuucacgagaacaagauuauucacagagaucugaagccagagaacaucgugcugcaagaugucggaggaaagaucauucauaagaucaucgaccugggauacgccaaggacguggaucaaggcgaacugugcaccgaauucgugggaacccuccaguaccuggccccggaacuguucgaaaacaaacccuacaccgccaccguggacuacugguccuuuggaacuaugguguucgaguguauagcuggcuaccggccauuucuccaucacuugcagcccuucaccuggcacgaaaagaucaagaagaaggaccccaagugcauuuucgcgugcgaagagaugucgggggaagugcgcuucucgucccacuugccccagcccaacucccugugcucccugguggucgaaccgauggaaaacuggcugcaacugaugcugaacugggauccucaacagcgcgguggaccaguggaucugacucugaagcagcccagaugcuucgugcugauggaccauauccugaaccucaagaucguccacauccugaacaugaccuccgccaagaucauuuccuuccuccucccgcccgaugagagccugcacucacugcaguccagaaucgagagggaaaccgguauuaacacugggucacaggaacuccuguccgaaaccggaaucucucuggacccucgcaagccagcaucccagugcguccuggauggggucaggggaugcgacucguacauggucuaccucuucgauaagucaaagaccgucuacgagggacccuuugccagccggagccugucagacugcgugaacuacaucgugcaggacucuaagauucagcugccaauuauccagcuccggaaagucugggcagaagcggugcacuacguguccggacugaaagaggacuacucccggcuguuccagggccagagggcagccaugcugucccugcuccgcuacaacgccaaccucacgaagaugaagaacacccugaucuccgcgucacaacaacugaaggccaagcuggaauucuuccacaaguccauucaauuggaucuggagcgguacuccgagcagaugacuuacggcauuagcuccgaaaagaugcucaaggccuggaaggagauggaggagaaggccauucauuaugccgaagugggggugaucggauaccuggaggaucagaucaugucccuucaugccgagauuauggaacuccagaaguccccguaccggaggcagggcgauuugauggagagcuuggaacaacgcgccaucgaccuguacaagcagcucaagcacagaccgagcgaccacucguacuccgacucgacugagauggugaaaauuaucgugcacaccgugcagucccaagaccggguccugaaggagcuguucggacaccugagcaagcugcuggggugcaagcaaaagaucauugaccuucugccaaaaguggagguggcccugagcaacauuaaggaagccgacaacaccgugauguucaugcagggcaagcggcagaaggagaucuggcaucuucucaagaucgcguguacccaggcugcagcgagagccuuggugggcgcugcccuggaaggugccguggcaccacaggccgcugcuuggcugccuccugcugcugcugagcacgaucacgcacuggccugcgugguggcaccgcaggacggagaggcugccgcgcagaugaucgaggaaaaccugaacugccugggucaccuggcugccaucauccacgaagccaacgaggagcaaggaaacagcaugaugaaucucgacuggagcuggcugacugag

SEQ ID NO: 1429 - RNA, 2235 nt, Artificial Sequence
  Synthetic: Mouse constitutively active IKK alpha (PEST mutation) P.4017/4018 without epitope tag - nucleotide
auggaaagaccgccuggauugcgaccuggagccggaggacccugggaaaugagagagagauuggguacuggaggcuucggaaaugucucgcuguaccagcaccgcgagcucgaccugaagaucgcgaucaaguccugucgccuggagcuguccagcaagaacagagagcgguggugccacgagauccagauuaugaagaagcuggaccaugccaacgucgugaaggcuugcgaugucccggaggaacucaauuuccuuauuaacgacgugccgcuucucgcgauggaguacugcucaggcggcgacuugcgcaagcugcuuaacaagcccgaaaacugcugcggucugaaggaaucccaaauucugucacuccuguccgauauuggcucaggaauccgcuaccuucaugagaauaagaucauccaccgcgaccugaagccugagaacauugugcugcaggaugucgggggaaagacuauccacaagauaaucgaccugggauacgccaaggacgucgaucaaggggaacugugcaccgaauucguggggacucuccaguacuuggcccccgaacuguuugaaaacaagcccuacaccgccaccguggauuacugguccuucgggacuaugguguucgaguguauugccggcuaucgccccuuucugcaccaccuccagcccuuuacuuggcacgaaaagaucaagaagaaggauccgaagugcaucuucgcuugcgaagagaugaccggagaaguccgguuuuccagccaucugccucagccgaacucccuguguucccugauuguggaacccauggagagcugguugcagcucaugcucaacugggauccgcagcaacgcgguggcccaaucgaucuuacccuuaagcagccucggugcuucgcgcugauggaccacauccucaaucugaagaucgugcacauccugaacaugacuuccgccaagaucaucuccuuccugcugccgugcgacgaaagccugcacucacugcagagccggaucgaacgggagacaggcauaaacacgggaucgcaagaacugcuguccgaaaccggcaucucccuggacccacggaagccugccucccaaugcguccuggacggagugcgggguugcgacucauacaugguguaccucuucgauaagucaaagaccguguaugaaggacccuucgccucccgcucccugagcgacugcgugaacuacaucgugcaggacucgaagauccagcugccgauuauccagcuucggaaggucugggcggaggcugugcacuacguguccgguuugaaagaggauuauagccgccuguuccagggacagagagccgccaugcugucccuccuccgguacaacgccaaccugaccaagaugaagaacacccugaucagcgccucgcagcagcugaaggccaagcuggaguucuuccggaagucgauccagcucgaccucgaaagguacucagaacagaugaccuacggaauuuccuccgagaagaugcugaaagccuggaaggaaauggaggagaaggccauucacuacuccgaagugggcgucauuggcuacuuggaggaccaaaucaugucucugcacaccgaaaucauggaacuccagaagucgccuuacggacgacgccaaggggaccugauggagagccuggaacagcgggccaucgaucuguacaagcaacugaagcauaggccgcccgaccaucucuacuccgacucgacugaaauggugaagauuauugugcauacagugcagagccaggacagagugcugaaggagcuguucggccaccuguccaagcuccuggguugcaagcagaagauuaucgaucuguugcccaagguggaaguggcccugucuaacaucaaagaagccgacaacacugugauguuuaugcaaggaaagcggcagaaagaaaucuggcaccuucugaaaaucgcgugcacccaggcugcagcuagggcacucgugggugcagcgcuugaaggcgccguggcaccuccugucgcugccugguugccacccgcgcuugcugacagagagcacccacugacuugugugguggccccacaggacggagaagcacuggcccagaugauugaggagaaccugaacugucugggacaccuugccgccauuauccgggaggccaacgaggaccaguccucgucccugaugucccuggauuggucauggcucgcugaa

SEQ ID NO: 1430 - RNA, 2271 nt, Artificial Sequence
  Synthetic: Mouse constitutively active IKK beta (PEST mutation) P.4019/4020 without epitope tag - nucleotide
augagcuggagcccuucacugccaacccaaaccuguggagccugggaaaugaaagaaagacugggaaccggagguuucggcaacgugauccgcuggcauaaccaggccacuggggagcagauugccaucaagcagugccggcaggagcuguccccgaagaaccgcaaccgguggugccuggaaauccagaucaugcggcggcuuaaccaccccaacguggucgccgcgagagaugugccggagggcaugcaaaaccuggcccccaacgaucucccgcuguuggcgauggaguauugccaggguggcgaucugcggcgcuaccugaaucaauucgagaacugcugcggucugcgcgaaggagcugugcuuacgcugcucucggacaucgccucggcgcugagauaccuccacgaaaaucggaucauccaccgagaucucaagccggaaaacauugugcuucagcaaggggaaaagcgccucauccauaagaucaucgaucucggcuacgccaaggaguuggaccagggggagcucugcacugaauucgugggaacucugcaguacuuggcgcccgaacugcuggagcaacagaaguacacugugaccguggacuacugguccuuuggaacccuggccuucgagugcauuacuggcuuccggccuuuccuuccaaacuggcagccggugcaguggcacucaaagguccgccagaaguccgaaguggacaucgugguguccgaggacuugaacggcgccgugaaguucucguccucccugcccuucccgaacaaccucaacuccgugcuggccgagaggcuggaaaaguggcugcagcuuaugcugauguggcacccuagacagcgcggaacugauccgcaguacggcccgaacggcuguuuuagggcccuggacgacauucugaaccugaaacucguccacgugcuuaacauggucaccgguaccguccauaccuauccggucaccgaggacgaaucccugcagucccucaagacucggauucaggagaauaccggcauucuggaaaccgaccaggagcugcugcagaaggccggacuggugcugcuccccgauaagcccgcaacccagugcaucucagacuccaagaccaacgagggccugacucucgacauggaccugguguuccugcucgacaacagcaagaucaacuacgaaacccaaauuaccccuagaccaccaccugaauccgugagcugcauacugcaggagcccaagcgcaaccucuccuucuuccaacuccggaaggucuggggccaaguguggcacuccauucagacucugaaggaagauuguaacaggcugcagcagggacagagagccgccaugaugagccuucugaggaacaacucuugccugucaaagaugaagaacgccauggcuuccaccgcgcagcaguugaaggcgaagcuggacuucuuuaagaccuccauccaaaucgaccuggagaaguacaaggaacagacugaguucgggauuacgagcgauaaacuccugcucgcuuggcgggaaauggagcaagcaguggagcagugcggacgggagaacgacgucaagcaucucguggagcggaugauggcgcugcagaccgacauugucgacuugcagcgcucuccaaugggacggaagcagggagggacucuggacgaucuggaggaacaggcccgggaacuguacagaaagcugagggagaagccccgggaucaaagaaccgaaggagacucgcaagagauggugcgccugcugcugcaggcgauccaguccuucgagaagaagguccgcgugaucuacacucagcuguccaagaccguggucuguaaacagaaggcccuggaacugcucccgaaaguggaagaaguggugucgcucaugaaugaggacgagagaaccguggugcgccuccaagaaaagcggcagaaggaacucuggaaccuccucaagauugccugcucgaaagugcggggaccuguggcuggugcuccugacgccaugaacguggccaggcuugcucacccuggccaacuuauggcccagccugcauccgccugugacgcacugcccgagucggacaagaaggccgaagaacuggucgccgaagcccacgcacugugcagccgccuggaaagcgcgcugcaggacaccgugaaggagcaggaccgcagcuuuaccacucuugauugguccuggcugcaaauggaggacgaagaacggugcucccuggaacaggccugcgac

SEQ ID NO: 1431 - RNA, 75 nt, Artificial Sequence
  Synthetic: (KRAS G12D 25mer nucleotide sequence)
augaccgaguacaagcuggugguggugggcgccgacggcgugggcaagagcgcccugaccauccagcugauccag

SEQ ID NO: 1432 - RNA, 75 nt, Artificial Sequence
  Synthetic: (KRAS G12V 25mer nucleotide sequence)
augaccgaguacaagcuggugguggugggcgccgugggcgugggcaagagcgcccugaccauccagcugauccag

SEQ ID NO: 1433 - RNA, 75 nt, Artificial Sequence
  Synthetic: (KRAS G13D 25mer nucleotide sequence)
augaccgaguacaagcuggugguggugggcgccggcgacgugggcaagagcgcccugaccauccagcugauccag

SEQ ID NO: 1434 - RNA, 225 nt, Artificial Sequence
  Synthetic: (KRAS G12D 25mer^3 nucleotide sequence)
augaccgaguacaaguuagugguugugggcgccgacggcgugggcaagagcgcccucaccauccagcuuauccagaugacggaauauaaguuaguaguagugggagccgacggugucggcaaguccgcuuugaccauucaacuuauucagaugacagaguauaagcuggucguuguaggcgcagacggcguuggaaagucggcacugacgauccaguugauccag

SEQ ID NO: 1435 - RNA, 225 nt, Artificial Sequence
  Synthetic: (KRAS G12V 25mer^3 nucleotide sequence)
augaccgaguacaagcucgucguggugggcgccgugggcgugggcaagagcgcccuaaccauccaguugauccagaugaccgaauauaagcucgugguagucggagcggugggcguuggcaagucagcgcuaacaauacaacuaauccaaaugaccgaauacaagcuaguuguagucggugccgucggcguuggaaagucagcccuuacaauucagcucauucag

SEQ ID NO: 1436 - RNA, 225 nt, Artificial Sequence
  Synthetic: (KRAS G13D 25mer^3 nucleotide sequence)
augaccgaguacaagcucguagugguuggcgccggcgacgugggcaagagcgcccuaaccauccagcucauccagaugacagaauauaagcuugugguugugggagcaggagacgugggaaagagugcguugacgauucaacucauacagaugaccgaauacaaguuggugguggucggcgcaggugacguugguaagucugcacuaacuauacaacugauccag

SEQ ID NO: 1437 - RNA, 75 nt, Artificial Sequence
  Synthetic: (KRAS G12C 25mer nucleotide sequence)
augaccgaguacaagcuggugguggugggcgccugcggcgugggcaagagcgcccugaccauccagcugauccag

SEQ ID NO: 1438 - RNA, 225 nt, Artificial Sequence
  Synthetic: (KRAS G12C 25mer^3 nucleotide sequence)
augaccgaguacaagcucgugguuguuggcgccugcggcgugggcaagagcgcccucaccauccagcucauccagaugacagaguauaaguuagucguugucggagcuugcggaguuggaaagucggcgcucaccauucaacucauacaaaugacagaauauaaguuagugguggugggugcguguggcguuggcaagagugcgcuuacuauccagcucauucag

SEQ ID NO: 1439 - RNA, 75 nt, Artificial Sequence
  Synthetic: (KRAS WT 25mer nucleotide sequence)
augaccgaguacaagcuggugguggugggcgccggcggcgugggcaagagcgcccugaccauccagcugauccag

SEQ ID NO: 1440 - RNA, 47 nt, Artificial Sequence
  Synthetic: (5 UTR sequence; no promoter)
gggaaauaagagagaaaagaagaguaagaagaaauauaagagccacc

SEQ ID NO: 1441 - RNA, 225 nt, Artificial Sequence
  Synthetic: (KRAS(G12D G12V G13D) 75mer 3MUT nt. seq)
augaccgaguacaagcucguuguagucggcgccgacggcgugggcaagagcgccuugaccauccaguugauccagaugaccgaauauaaguugguggugguaggcgcagugggaguuggcaagucagcacucacaauucagcucauucaaaugacagaauacaaguuagucguuguaggagcaggcgacgucggcaagagugccuuaaccauucaacuaauccag

SEQ ID NO: 1442 - RNA, 1137 nt, Artificial Sequence
  Synthetic: (Hu STING(R284U); no epitope tag; nucleotide sequence)
augccucacagcagccugcacccuagcaucccuugcccuagaggccacggcgcccagaaggccgcccuggugcugcugagcgccugccuggugacccuguggggccugggcgagccuccugagcacacccugagauaccuggugcugcaccuggccagccugcagcugggccugcugcugaacggcgugugcagccuggccgaggagcugagacacauccacagcagauacagaggcagcuacuggagaaccgugagagccugccugggcugcccucugagaagaggcgcccugcugcugcugagcaucuacuucuacuacagccugccuaacgccgugggcccuccuuucaccuggaugcuggcccugcugggccugagccaggcccugaacauccugcugggccugaagggccuggccccugccgagaucagcgccgugugcgagaagggcaacuucaacguggcccacggccuggccuggagcuacuacaucggcuaccugagacugauccugccugagcugcaggccagaaucagaaccuacaaccagcacuacaacaaccugcugagaggcgccgugagccagagacuguacauccugcugccucuggacugcggcgugccugacaaccugagcauggccgacccuaacaucagauuccuggacaagcugccucagcagaccggcgaccacgccggcaucaaggacagaguguacagcaacagcaucuacgagcugcuggagaacggccagagagccggcaccugcgugcuggaguacgccaccccucugcagacccuguucgccaugagccaguacagccaggccggcuucagcagagaggacacccuggagcaggccaagcuguucugcagaacccuggaggacauccuggccgacgccccugagagccagaacaacugcagacugaucgccuaccaggagccugccgacgacagcagcuucagccugagccaggaggugcugagacaccugagacaggaggagaaggaggaggugaccgugggcagccugaagaccagcgccgugccuagcaccagcaccaugagccaggagccugagcugcugaucagcggcauggagaagccucugccucugagaaccgacuucagc

SEQ ID NO: 1443 - RNA, 1137 nt, Artificial Sequence
  Synthetic: (hu STING (R284M); no epitope tag; nucleotide sequence)
augccccacagcagccugcaccccuccauccccugucccagaggccacggcgcccagaaggccgcccuggugcugcugagcgccugccuggugaccuuauggggccugggcgagccccccgagcacacccugagauaccugguccugcaccuggccagccuccagcugggccugcugcucaacggcguguguagccuggccgaggagcugagacacauccacagcagauacagaggcagcuacuggagaaccgugagagccugccuggguugcccacugagaagaggagcucugcugcugcugagcaucuacuucuacuacucgcugcccaacgcugugggcccccccuucaccuggaugcuggcccugcugggucugagccaggcccugaacauccuccugggccugaagggccuggcccccgccgagauaagcgccguuugcgagaagggcaacuucaacguggcccauggccuggccuggagcuacuacaucggcuacuuacgccugauccugcccgagcugcaggccagaaucagaaccuacaaccagcauuacaacaaccugcugagaggcgccgugagccagagacuguauauccugcugccccuggacugcggcgugcccgacaaccugagcauggccgaccccaacaucagauuccuggacaagcucccccagcagaccggcgaccacgccggaaucaaagacagaguguauagcaacagcaucuacgagcugcuggagaacggccagagagccggcaccugcguacuggaguacgccacccccuugcagacccuguuugccaugagccaguacagccaggccggcuucagcagagaggacaugcuggagcaggccaagcuguucugcagaacccuggaggacauccuggccgacgcccccgagagccagaacaacugcagacugaucgccuaccaagagcccgccgacgacagcagcuucagcuuaagccaggaggugcugagacaucugagacaggaggagaaggaggaggugaccgugggcagccucaagaccagcgcugugcccucuaccagcaccaugagccaggagcccgagcugcugaucagcggcauggagaagccccugccccugagaacagacuucagc

SEQ ID NO: 1444 - RNA, 1137 nt, Artificial Sequence
  Synthetic: (Hu STING (R284K); no epitope tag; nucleotide sequence)
augccccauagcagccugcaccccagcauccccugccccagaggccacggcgcccagaaggccgcccugguccugcugagcgcaugccuggucacccuguggggccugggcgagccccccgagcacacccugagauaccuggugcugcaccucgccagccugcagcugggccugcugcugaacggcgugugcagccuggccgaggagcugagacacauccacagcagauauagaggcagcuacuggagaaccgugagagcuugccucggcugcccccugagaagaggcgcccugcugcugcugagcaucuacuuuuacuacagccugcccaacgcugugggccccccuuucacguggaugcucgcccugcugggacugagccaggcccugaacauccugcugggccuuaagggccuagcccccgccgagaucagcgccgugugcgagaagggcaacuucaauguggcccacggccuggccuggagcuacuacaucggcuaccugagacugauccugcccgagcugcaggccagaaucagaaccuacaaucagcacuacaacaaccugcugagaggcgccgugagccagagacuguacauccugcugccccuggacugcggcgugcccgacaaccucagcauggccgaccccaacaucagauuccuggacaagcugccccagcagaccggcgaccacgccggcaucaaggaucgcguguacagcaacagcaucuacgagcugcuggaaaacggccagagagccggaaccugcgugcuggaguacgccacaccccugcagacccuguucgccaugagccaguacagccaggccggcuucagcagagaggacaagcuggagcaggccaagcuguucugcagaacccuggaggauauccucgccgacgcccccgagagccagaacaacugcaggcugaucgcguaccaggagcccgcugacgacagcagcuuuagccugagccaggaggugcugagacaucugcgucaagaggaaaaggaggaggugaccgugggcucccugaagaccagcgccgugcccagcaccagcaccaugagccaggagcccgagcugcugaucagcggcauggagaagccacugccccucagaaccgacuucagc

SEQ ID NO: 1445 - RNA, 1137 nt, Artificial Sequence
  Synthetic: (Hu STING(N154S); no epitope tag; nucleotide sequence)
augccucacagcagccugcacccuagcaucccuugcccuagaggccacggcgcccagaaggccgcccuggugcugcugagcgccugccuggugacccuguggggccugggcgagccuccugagcacacccugagauaccuggugcugcaccuggccagccugcagcugggccugcugcugaacggcgugugcagccuggccgaggagcugagacacauccacagcagauacagaggcagcuacuggagaaccgugagagccugccugggcugcccucugagaagaggcgcccugcugcugcugagcaucuacuucuacuacagccugccuaacgccgugggcccuccuuucaccuggaugcuggcccugcugggccugagccaggcccugaacauccugcugggccugaagggccuggccccugccgagaucagcgccgugugcgagaagggcaacuucagcguggcccacggccuggccuggagcuacuacaucggcuaccugagacugauccugccugagcugcaggccagaaucagaaccuacaaccagcacuacaacaaccugcugagaggcgccgugagccagagacuguacauccugcugccucuggacugcggcgugccugacaaccugagcauggccgacccuaacaucagauuccuggacaagcugccucagcagaccggcgaccacgccggcaucaaggacagaguguacagcaacagcaucuacgagcugcuggagaacggccagagagccggcaccugcgugcuggaguacgccaccccucugcagacccuguucgccaugagccaguacagccaggccggcuucagcagagaggacagacuggagcaggccaagcuguucugcagaacccuggaggacauccuggccgacgccccugagagccagaacaacugcagacugaucgccuaccaggagccugccgacgacagcagcuucagccugagccaggaggugcugagacaccugagacaggaggagaaggaggaggugaccgugggcagccugaagaccagcgccgugccuagcaccagcaccaugagccaggagccugagcugcugaucagcggcauggagaagccucugccucugagaaccgacuucagc

SEQ ID NO: 1446 - RNA, 1137 nt, Artificial Sequence
  Synthetic: (Hu STING(V147L); no epitope tag; nucleotide sequence)
augccucacagcagccugcacccuagcaucccuugcccuagaggccacggcgcccagaaggccgcccuggugcugcugagcgccugccuggugacccuguggggccugggcgagccuccugagcacacccugagauaccuggugcugcaccuggccagccugcagcugggccugcugcugaacggcgugugcagccuggccgaggagcugagacacauccacagcagauacagaggcagcuacuggagaaccgugagagccugccugggcugcccucugagaagaggcgcccugcugcugcugagcaucuacuucuacuacagccugccuaacgccgugggcccuccuuucaccuggaugcuggcccugcugggccugagccaggcccugaacauccugcugggccugaagggccuggccccugccgagaucagcgcccugugcgagaagggcaacuucaacguggcccacggccuggccuggagcuacuacaucggcuaccugagacugauccugccugagcugcaggccagaaucagaaccuacaaccagcacuacaacaaccugcugagaggcgccgugagccagagacuguacauccugcugccucuggacugcggcgugccugacaaccugagcauggccgacccuaacaucagauuccuggacaagcugccucagcagaccggcgaccacgccggcaucaaggacagaguguacagcaacagcaucuacgagcugcuggagaacggccagagagccggcaccugcgugcuggaguacgccaccccucugcagacccuguucgccaugagccaguacagccaggccggcuucagcagagaggacagacuggagcaggccaagcuguucugcagaacccuggaggacauccuggccgacgccccugagagccagaacaacugcagacugaucgccuaccaggagccugccgacgacagcagcuucagccugagccaggaggugcugagacaccugagacaggaggagaaggaggaggugaccgugggcagccugaagaccagcgccgugccuagcaccagcaccaugagccaggagccugagcugcugaucagcggcauggagaagccucugccucugagaaccgacuucagc

SEQ ID NO: 1447 - RNA, 1137 nt, Artificial Sequence
  Synthetic: (Hu STING (E315Q); no epitope tag; nucleotide sequence)
augccucacagcagccugcacccuagcaucccuugcccuagaggccacggcgcccagaaggccgcccuggugcugcugagcgccugccuggugacccuguggggccugggcgagccuccugagcacacccugagauaccuggugcugcaccuggccagccugcagcugggccugcugcugaacggcgugugcagccuggccgaggagcugagacacauccacagcagauacagaggcagcuacuggagaaccgugagagccugccugggcugcccucugagaagaggcgcccugcugcugcugagcaucuacuucuacuacagccugccuaacgccgugggcccuccuuucaccuggaugcuggcccugcugggccugagccaggcccugaacauccugcugggccugaagggccuggccccugccgagaucagcgccgugugcgagaagggcaacuucaacguggcccacggccuggccuggagcuacuacaucggcuaccugagacugauccugccugagcugcaggccagaaucagaaccuacaaccagcacuacaacaaccugcugagaggcgccgugagccagagacuguacauccugcugccucuggacugcggcgugccugacaaccugagcauggccgacccuaacaucagauuccuggacaagcugccucagcagaccggcgaccacgccggcaucaaggacagaguguacagcaacagcaucuacgagcugcuggagaacggccagagagccggcaccugcgugcuggaguacgccaccccucugcagacccuguucgccaugagccaguacagccaggccggcuucagcagagaggacagacuggagcaggccaagcuguucugcagaacccuggaggacauccuggccgacgccccugagagccagaacaacugcagacugaucgccuaccagcagccugccgacgacagcagcuucagccugagccaggaggugcugagacaccugagacaggaggagaaggaggaggugaccgugggcagccugaagaccagcgccgugccuagcaccagcaccaugagccaggagccugagcugcugaucagcggcauggagaagccucugccucugagaaccgacuucagc

SEQ ID NO: 1448 - RNA, 1137 nt, Artificial Sequence
  Synthetic: (Hu STING (R375A); no epitope tag; nucleotide sequence)
augccucacagcagccugcacccuagcaucccuugcccuagaggccacggcgcccagaaggccgcccuggugcugcugagcgccugccuggugacccuguggggccugggcgagccuccugagcacacccugagauaccuggugcugcaccuggccagccugcagcugggccugcugcugaacggcgugugcagccuggccgaggagcugagacacauccacagcagauacagaggcagcuacuggagaaccgugagagccugccugggcugcccucugagaagaggcgcccugcugcugcugagcaucuacuucuacuacagccugccuaacgccgugggcccuccuuucaccuggaugcuggcccugcugggccugagccaggcccugaacauccugcugggccugaagggccuggccccugccgagaucagcgccgugugcgagaagggcaacuucaacguggcccacggccuggccuggagcuacuacaucggcuaccugagacugauccugccugagcugcaggccagaaucagaaccuacaaccagcacuacaacaaccugcugagaggcgccgugagccagagacuguacauccugcugccucuggacugcggcgugccugacaaccugagcauggccgacccuaacaucagauuccuggacaagcugccucagcagaccggcgaccacgccggcaucaaggacagaguguacagcaacagcaucuacgagcugcuggagaacggccagagagccggcaccugcgugcuggaguacgccaccccucugcagacccuguucgccaugagccaguacagccaggccggcuucagcagagaggacagacuggagcaggccaagcuguucugcagaacccuggaggacauccuggccgacgccccugagagccagaacaacugcagacugaucgccuaccaggagccugccgacgacagcagcuucagccugagccaggaggugcugagacaccugagacaggaggagaaggaggaggugaccgugggcagccugaagaccagcgccgugccuagcaccagcaccaugagccaggagccugagcugcugaucagcggcauggagaagccucugccucuggccaccgacuucagc

SEQ ID NO: 1449 - RNA, 1137 nt, Artificial Sequence
  Synthetic: (Hu SUING(V147L/N154S/V155M); no epiUope Uag; nucleoUide sequence)
augccucacagcagccugcacccuagcaucccuugcccuagaggccacggcgcccagaaggccgcccuggugcugcugagcgccugccuggugacccuguggggccugggcgagccuccugagcacacccugagauaccuggugcugcaccuggccagccugcagcugggccugcugcugaacggcgugugcagccuggccgaggagcugagacacauccacagcagauacagaggcagcuacuggagaaccgugagagccugccugggcugcccucugagaagaggcgcccugcugcugcugagcaucuacuucuacuacagccugccuaacgccgugggcccuccuuucaccuggaugcuggcccugcugggccugagccaggcccugaacauccugcugggccugaagggccuggccccugccgagaucagcgcccugugcgagaagggcaacuucagcauggcccacggccuggccuggagcuacuacaucggcuaccugagacugauccugccugagcugcaggccagaaucagaaccuacaaccagcacuacaacaaccugcugagaggcgccgugagccagagacuguacauccugcugccucuggacugcggcgugccugacaaccugagcauggccgacccuaacaucagauuccuggacaagcugccucagcagaccggcgaccacgccggcaucaaggacagaguguacagcaacagcaucuacgagcugcuggagaacggccagagagccggcaccugcgugcuggaguacgccaccccucugcagacccuguucgccaugagccaguacagccaggccggcuucagcagagaggacagacuggagcaggccaagcuguucugcagaacccuggaggacauccuggccgacgccccugagagccagaacaacugcagacugaucgccuaccaggagccugccgacgacagcagcuucagccugagccaggaggugcugagacaccugagacaggaggagaaggaggaggugaccgugggcagccugaagaccagcgccgugccuagcaccagcaccaugagccaggagccugagcugcugaucagcggcauggagaagccucugccucugagaaccgacuucagc

SEQ ID NO: 1450 - RNA, 1137 nt, Artificial Sequence
  Synthetic: (Hu STING(R284M/V147L/N154S/V155M); no epitope tag; nucleotide sequence)
augccucacagcagccugcacccuagcaucccuugcccuagaggccacggcgcccagaaggccgcccuggugcugcugagcgccugccuggugacccuguggggccugggcgagccuccugagcacacccugagauaccuggugcugcaccuggccagccugcagcugggccugcugcugaacggcgugugcagccuggccgaggagcugagacacauccacagcagauacagaggcagcuacuggagaaccgugagagccugccugggcugcccucugagaagaggcgcccugcugcugcugagcaucuacuucuacuacagccugccuaacgccgugggcccuccuuucaccuggaugcuggcccugcugggccugagccaggcccugaacauccugcugggccugaagggccuggccccugccgagaucagcgcccugugcgagaagggcaacuucagcauggcccacggccuggccuggagcuacuacaucggcuaccugagacugauccugccugagcugcaggccagaaucagaaccuacaaccagcacuacaacaaccugcugagaggcgccgugagccagagacuguacauccugcugccucuggacugcggcgugccugacaaccugagcauggccgacccuaacaucagauuccuggacaagcugccucagcagaccggcgaccacgccggcaucaaggacagaguguacagcaacagcaucuacgagcugcuggagaacggccagagagccggcaccugcgugcuggaguacgccaccccucugcagacccuguucgccaugagccaguacagccaggccggcuucagcagagaggacaugcuggagcaggccaagcuguucugcagaacccuggaggacauccuggccgacgccccugagagccagaacaacugcagacugaucgccuaccaggagccugccgacgacagcagcuucagccugagccaggaggugcugagacaccugagacaggaggagaaggaggaggugaccgugggcagccugaagaccagcgccgugccuagcaccagcaccaugagccaggagccugagcugcugaucagcggcauggagaagccucugccucugagaaccgacuucagc

SEQ ID NO: 1451 - RNA, 141 nt, Artificial Sequence
  Synthetic: (3 UTR used in STING V155M construct, containing miR122 binding site)
ugauaauaggcuggagccucgguggccuagcuucuugccccuugggccuccccccagccccuccuccccuuccugcacccguaccccccaaacaccauugucacacuccaguggucuuugaauaaagucugagugggcggc

SEQ ID NO: 1452 - RNA, 1257 nt, Artificial Sequence
  Synthetic: (super mouse IRF3 S396D; no epitope tag)
auggagacccccaagccuagaauccugcccuggcuggugagccagcuggaccugggccagcuggagggcguagccuggcuggacgagagcagaaccagauucagaauccccuggaagcacggccugagacaagacgcccagauggccgacuucggcaucuuccaggccugggccgaggccagcggcgccuacaccccuggcaaggauaagcccgaugugagcaccuggaagagaaacuucagaagcgcccugaacagaaaggaggugcugagacuggccgccgacaauagcaaggaccccuacgacccccacaagguguacgaguucguuacccccggcgccagggacuucgugcaccugggcgccagccccgacaccaacggcaagagcagccugccccacagccaggagaaccugcccaagcuguucgauggccugauccugggcccccugaaggacgagggcagcagcgaccuggccaucgugagcgacccuagccagcagcugcccucccccaacgugaacaacuuccugaaccccgccccccaggagaacccccugaagcaacugcuggccgaggagcagugggaguucgaggugaccgccuucuacagaggcagacagguguuccagcagacccuguucugccccggcggccugagacugguaggcagcaccgcugacaugacccugcccuggcagcccgugacccugcccgaccccgaaggcuuucugaccgacaagcuggugaaggaguacgucggccaagugcugaagggccugggcaacggccuggcccuguggcaggccggccagugccugugggcccagagacucggccacagccacgccuucugggcccugggcgaggaacuccugcccgauagcggcagaggccccgacggcgaggugcacaaggacaaggacggcgccguguucgaccugcgccccuucguggccgaccugaucgccuucauggagggcagcggccacagccccagauauacccugugguucugcaugggcgagauguggccccaggaccagcccugggugaagagacuggugauggugaagguggugcccaccugccugaaagagcugcuggagauggccagagagggcggcgccagcucccugaaaaccguggaccugcacauugacaacagccagcccaucagccugaccagcgaccaguacaaggccuaccugcaggaccugguggaggacauggacuuccaggccaccggcaacauc

SEQ ID NO: 1453 - RNA, 1281 nt, Artificial Sequence
  Synthetic: (super human IRF3 S396D; no epitope tag)
augggcacccccaagcccagaauccugcccuggcuggugagccagcuggaccugggccagcuggagggaguggccugggugaacaagagcagaaccagauucagaauccccuggaagcacggccucagacaggacgcccagcaggaggacuucggcauuuuucaggcuugggccgaggccaccggcgccuacgugcccggcagagacaagcccgaccugcccaccuggaaaagaaacuucagaagcgccuugaauagaaaggagggccugagacuggccgaggacagaagcaaggacccccacgacccucacaagaucuacgaguucgugaauagcggcgugggcgacuuuagccagcccgacaccagccccgacaccaacggcggcggcagcaccagcgacacgcaggaggacauccuggaugaacugcugggcaacauggugcuggccccccugcccgaucccggccccccuucgcuugccguggcccccgagcccugcccccagccccugagaagccccucucuggauaaccccacccccuuccccaaccugggccccagcgagaauccacugaagagacuucugguccccggcgaggagugggaguucgaggugaccgccuucuacagaggcagacagguguuccagcagaccaucagcugccccgaaggccugagauuagugggcagcgaagugggcgacaggacccugcccggguggcccgugacccugcccgaucccggcaugagccugaccgacagaggugugaugagcuacgugagacacgugcugagcugccugggcggcggccuggcacuguggagagccggccaguggcugugggcccagagacugggccacugccacaccuacugggccgugagcgaggagcugcugcccaacagcggccacggccccgacggcgaggugcccaaggacaaggaagggggcguguucgaccugggccccuucaucguagaccugaucaccuuuaccgagggcagcggcaggagccccagauacgcccugugguucugcgugggcgaaagcuggccccaggaccagcccuggaccaagagacuggugauggugaagguagugcccaccugccugagagccuuaguggagauggccagagugggcggggccagcagccuggagaacaccguggaucuucacaucgacaacagccacccccugagccugaccagcgaccaguacaaggccuaccugcaggaccugguggagggcauggacuuccagggccccggcgagacc

SEQ ID NO: 1454 - RNA, 1509 nt, Artificial Sequence
  Synthetic: (Wild-type Hu IRF7 isoform A; P037 without epitope tag)
auggcgcuggcccccgaaagagccgcccccagaguccucuucggcgaauggcuccuuggcgaaauuucgucgggcugcuacgagggcuuacaauggcuggaugaggcgagaaccuguuucagggugcccuggaaacacuucgccagaaaggaucuaagcgaagcagaugcuagaauuuuuaaggcuugggccguggccaggggaagauggccccccucgagcagaggcggcggcccuccccccgaggcagaaacggccgagagagccggauggaaaaccaauuucagaugcgcccugagaucuacaagaagauucgugaugcuuagagacaacagcggagaucccgccgauccccauaagguguaugcccugucccgggagcugugcuggagggaagggccuggcacugaccagaccgaagccgaagcccccgcggccgugccgccgccccaaggaggcccaccaggcccuuuccucgcucacacccacgccggucugcaagccccgggaccucuaccugccccugccggcgauaaaggcgaccuguugcugcaggccguccaacagagcugccuggccgaucaucugcucacagccagcuggggcgcugaccccgucccaacaaaggcccccggugagggccaagaaggccugccucugaccggcgccugugccggcggcccuggccugccugcuggcgagcuguacggaugggcugucgaaaccacucccucccccggcccccaaccugcggcccugacaaccggcgaggcagccgcacccgaaagcccccaccaggccgaacccuaccucagucccagccccuccgccugcaccgcugugcaggagcccagccccggugcucuggacguaacaaucauguacaaaggcagaaccgugcuucagaaggugguuggacaccccuccuguacuuuucucuacggcccccccgacccugccgugagagcuaccgacccgcaacagguggccuuucccucgcccgccgaacugcccgaucaaaaacagcugagauacaccgaggagcugcugagacacguggcgccgggcuuacaccuagaguugagaggcccccaacucugggccagacgcaugggcaaguguaagguguacugggaggucgggggcccucccggcucugccagccccagcaccccugcuugucucuugcccagaaacugugauacccccaucuucgacuuccguguauuuuuccaggaacuggucgaguuuagagccagacagagacgaggcagccccagauauacaaucuaccucggcuucggccaggaccugagugccggcagaccuaaggagaagucgcugguccuagugaaguuagagcccuggcuauguagagugcaccuggagggcacccagagagaaggagugagcagccuggacagcagcagccugagucugugccugagcuccgccaacucgcuguaugaugacaucgaguguuuccucauggagcuggagcagcccgcc

SEQ ID NO: 1455 - RNA, 1509 nt, Artificial Sequence
  Synthetic: (constitutively active Hu IRF7 S477D/S479D; P033 without epitope tag)
auggcccuugccccugagcgggccgcccccagaguguuauucggcgaguggcugcugggcgagaucagcagcggcugcuacgagggacugcaguggcuggacgaggcuagaaccugcuucagagugcccuggaagcauuucgccagaaaagaccugagcgaggcugaugcuagaaucuucaaagccugggcuguggcccgaggaagauggccccccagcagcagaggaggcggcccuccucccgaggccgaaaccgcagagcgugcuggcuggaaaaccaacuuuaggugugcccugaggagcaccagaagauucguuaugcucagagacaacagcggggaccccgccgacccgcacaagguguacgccuuaaguagggagcugugcuggagagagggaccggggaccgaccaaaccgaggcugaggcgcccgccgccguuccaccuccccaggguggucccccagggcccuuucuggcacacacccacgccggauuacaggcgccagggcccuuacccgcccccgccggagacaaaggcgaccuccugcugcaagccgugcaacaaagcugccuggccgaucacuuacuaaccgcuagcuggggcgccgauccuguucccaccaaggcccccggugaagggcaagaaggacugcccuuaaccggcgccugugccggaggcccuggucugccagccggcgagcuguacgguugggcugucgaaacaacacccaguccgggcccacagccugccgcucugaccaccggcgaagccgccgcccccgagagcccacaccaggcugaacccuaccugagccccagccccagcgccugcaccgcugugcaggagccuagccccggcgcucuugaugugacaauaauguacaagggcaggaccgugcugcaaaaggucgugggccauccgucguguaccuuucuguacggcccuccagaccccgcgguuagagccaccgacccccagcaagucgccuuccccucccccgccgaacugcccgaccaaaagcagcugcgguacacagaagaacuacuuagacacguggcccccggucugcacuuggagcugagaggcccccagcucugggccagaagaaugggcaagugcaaaguguacugggaggugggcggcccacccggcucagcuucgcccuccacacccgcaugccugcugcccagaaauugcgacacgcccaucuucgauuuuagaguguucuuucaggaguugguggaguucagagccagacaaagacgcggcagccccagauacaccauuuaccucggcuucggccaggaccucagcgcuggcagacccaaggagaagagucugguccucgugaagcuggagcccuggcugugcagagugcaccuggagggcacccagcgugaaggcgugagcagccuggauucaagcgaccuggaccuaugccuaagcagcgcuaacucacuguacgacgauaucgaaugcuuccugauggaacuggagcagccugcc

SEQ ID NO: 1456 - RNA, 1509 nt, Artificial Sequence
  Synthetic: (constitutively active Hu IRF7 S475D/S477D/L480D; P034 without epitope tag)
auggcccuggcacccgagagggccgcccccagggugcucuucggcgagugguuacuaggcgaaauuagcagcggcugcuaugaaggccuucaguggcuggacgaggccagaaccugcuuuagaguucccuggaagcacuucgcccggaaagaucucucugaagccgacgccagaauauucaaggccugggcugucgccaggggcagguggccacccuccagccgagguggcggcccucccccugaggcugagacugcggaaagggcgggcuggaagaccaauuucagaugcgcucugagaagcaccagacguuuugugaugcuaagagacaauagcggcgaucccgccgacccccauaagguauacgcacugagccgagagcucuguuggagagaaggccccggcaccgaccagaccgaggcugaagccccugcagccgugccccccccucaaggcgggccccccggccccuuccuggcccauacccaugcaggguuacaagcacccgggcccuugcccgccccagcgggagacaagggcgaccucuuacugcaggccgugcaacaaaguugucuggcggaccaccugcugaccgcaucauggggcgcggauccugugcccaccaaggcacccggcgaaggccaggagggccugcccuugaccggcgccugcgcuggcggacccggccuaccugcuggcgaacuguauggcugggccguagagacgacucccagcccuggcccacaacccgcggcuuugaccaccggcgaagccgccgcccccgagucuccgcaccaggccgagccuuaccucagcccaagcccuagcgccugcaccgccgugcaagaaccuagccccggagcccuggaugugacaaucauguacaaggguagaaccguacugcaaaagguggugggucaucccagcugcaccuuucuuuacggcccacccgacccugccgugcgagccacagacccacaacaggucgccuucccaagccccgccgaacugcccgaucagaaacagcugagauauacagaggagcuucugcggcacguagcucccggccuacaucucgagcugaggggcccacaacugugggccagacgcaugggcaaaugcaaggucuacugggaagugggaggcccccccggcagcgcaucucccagcacgcccgcgugccugcugccuagaaauugcgacacccccaucuuugacuuccggguauucuuucaggagcugguagaguucagagccaggcagcggaggggcucccccagauacacaaucuaccugggcuucggacaggaccuguccgccggccgccccaaggaaaagagccuggugcuggugaagcuggagcccuggcuguguaggguacaccucgaaggcacccagagagaaggagugagcucgcuugaugacagcgaucugucggauugccuuagcagcgccaacagccuguaugaugauaucgagugcuuccuuauggaacuggagcagcccgcc

SEQ ID NO: 1457 - RNA, 1509 nt, Artificial Sequence
  Synthetic: (constitutively active Hu IRF7 S475D/S476D/S477D/S479D/S483D/S487D; P035 without epitope tag)
auggcccuagcccccgaaagagcagcucccagagugcuguucggcgaauggcugcuuggcgagaucagcagcggcugcuacgaaggccugcaguggcuggacgaagcccgcaccuguuucagagugcccuggaagcacuucgcuagaaaggauuugagcgaggcugaugcuagaaucuuuaaggcuugggcuguggcaagaggcagauggccgccuaguagcagagggggcggaccuccccccgaggcugagaccgcugagagagcaggguggaaaaccaacuucagaugcgcgcugagaagcacccgaagauucgugaugcuacgugacaauagcggcgaccccgccgacccccacaaaguguacgcccugucccgagaacuuugcuggagagagggacccggcaccgaucaaacagaggcugaggccccggccgcuguacccccgccccaaggaggccccccaggccccuuucuggcucauacacaugccggccugcaggcacccgggccccucccggcuccugccggcgacaagggcgaucuccuucuccaggccgugcagcagagcugccuggccgaucaccugcugaccgccucguggggcgccgaccccgugcccaccaaagccccgggugaaggccaagaggggcucccuuuaaccggagcaugcgccggaggccccggccugccagccggcgaguuauauggcugggcuguggagaccacacccucccccggcccucaacccgcugcccugaccaccggugaggccgccgcccccgagagcccacaccaggccgaacccuaccugagcccuagcccuagcgccugcaccgccgugcaagaacccagccccggagcccuggaugugaccauuauguacaagggccggacagugcugcaaaagguugugggacacccgagcugcaccuuucuguacgguccgccugaccccgccgugagagccacggacccgcagcagguggccuuccccucacccgcggagcugcccgaccaaaagcaacucagauacacagaagaacuauugcgucacgucgcgcccggccugcaucuggagcugagaggcccccagcucugggccagaaggaugggcaaaugcaagguguacugggaggugggaggcccccccggcagcgccagccccagcacucccgcgugccugcugcccagaaauugcgacacucccaucuucgauuucaggguguucuuccaggagcugguggaguucagagccaggcagagaagggguagccccagauacacaaucuaucuaggcuuuggacaagaucugagcgccggccggccuaaggaaaaaagccuggugcugguaaagcuggagccguggcuuuguagagugcaccuggaggggacgcagcgagagggcgugagcagcuuagacgacgaugacuuggaucugugucucgacagcgccaacgacuuguacgacgacaucgagugcuuccugauggaacuggagcagcccgcc

SEQ ID NO: 1458 - RNA, 846 nt, Artificial Sequence
  Synthetic: (constitutively active truncated Hu IRF7 1-246 + 468-503; P032 without epitope tag)
auggcccuggcccccgagagagccgcccccagagugcucuucggcgaguggcugcugggcgagauaagcagcggcugcuacgaaggucugcaguggcuagacgaggccagaaccugcuuuagagugcccuggaagcacuucgcucgaaaggaccuguccgaggccgaugcuagaauuuuuaaggcuugggccgucgcuaggggaagauggcccccuagcaguagaggcggcggccccccucccgaagccgagacggccgagagggccggcuggaaaaccaauuucagaugcgcccugaggagcacccgcagguucguaaugcugcgagacaauagcggcgauccugcggauccucacaagguuuacgccuugaguagagaacugugcuggcgggagggccccggaaccgaccagacggaggcagaggcacccgcugccgugccccccccucaaggaggacccccuggacccuuucuggcccacacccacgcuggucugcaggccccaggcccacugcccgccccagcgggcgauaagggugaccugcuccuacaggcggugcaacagagcugucuggccgaccaccuguugaccgccagcuggggggccgacccggugcccaccaaagcucccggagagggccaagaaggccucccacuaacuggcgccugcgccgggggcccgggauuacccgccggcgagcuguauggcugggccguggagaccacgcccagccccgagggcgugucgucccuggacagcagcagccugagccugugccugagcuccgccaacagccuguaugacgacaucgagugcuuccugauggagcuggaacaacccgcc

SEQ ID NO: 1459 - RNA, 846 nt, Artificial Sequence
  Synthetic: (constitutively active truncated Hu IRF7 1-246 + 468-503 plus S475D/S476D/S477D/S479D/S483D/S487D; P036 without epitope tag)
auggcacuggcgccugaaagagccgcuccgcgugugcucuucggcgaguggcugcugggcgagaucagcuccggcugcuacgagggucuacaguggcuggacgaggccagaaccuguuuuagagugcccuggaagcacuucgcgagaaaggaccugagcgaggccgacgccagaaucuucaaagccugggcaguggcuaggggcagauggccucccagcagccggggcggcggcccaccccccgaggccgaaaccgccgaaagagcuggcuggaagaccaacuucagaugcgcccugagaagcaccagaagauuugucaugcugagagauaauucaggagaccccgccgacccucacaagguguacgcccuguccagagagcuguguuggagagagggccccggaaccgaccagaccgaggccgaggcuccagcugccgugccacccccccaaggcggaccacccggccccuucuuggcacauacgcacgccggccuccaggcucccggcccucugcccgccccugcuggugacaaaggcgaucugcugcugcaagccguccagcaauccugcuuggcugaccaccugcugaccgcuagcuggggagccgaccccguucccaccaaggcucccggagaaggacaggagggccugccccuuaccggcgcuugcgcggggggcccuggcuugccugccggcgaacuguacggcugggccguggagaccacgccuucccccgagggcguguccagccuggacgaugaugaccuggaucugugccuggacagcgccaacgaccuguacgaugacaucgagugcuuuuugauggagcuggagcagcccgcc

SEQ ID NO: 1460 - RNA, 1224 nt, Artificial Sequence
  Synthetic: (truncated Hu IRF7 1-151 + 247-503; P038 without epitope tag; null mutation)
auggcccuggcccccgagagagccgcgcccagagugcuguucggcgaauggcugcugggcgagaucagcagcggcugcuaugagggccugcaguggcucgacgaagccaggacgugcuucagaguccccuggaagcacuucgccagaaaggaucugagcgaggcugacgccagaaucuucaaggccugggcaguugcgcgugggagauggccccccagcucgcggggcggcgguccccccccugaggccgagaccgccgaaagagccggauggaaaaccaacuuucgaugcgcccucagaagcaccagacgguuugugaugcugagagauaacagcggcgacccugcagacccccauaaaguguaugcccugagcagagagcuguguuggcgagagggccccggaaccgaccaaaccgaggccgaggcccccgccgccguaccccccccucaaggcccccagccugcugcucugaccacgggagaagccgccgcuccugagagcccccaccaagccgagcccuaucugagcccuagccccagcgccugcaccgccgugcaggagcccucaccgggcgcccuagacgugaccaucauguacaaggggcgcacggugcugcaaaagguggugggccaccccagcugcaccuuccuguacggcccccccgacccugccgugagagccaccgacccccagcaagucgccuuccccagccccgccgagcugcccgaccagaagcagcugagguacaccgaggaguugcugagacauguggcccccggcuugcaccucgagcugagaggcccgcagcucugggccagaagaaugggcaagugcaagguguacugggaggugggcggcccccccggcagcgcgagcccaagcaccccggccugccugcugccuagaaacugcgacaccccuaucuucgacuucagaguauuuuuccaggagcuggucgaguucagggccagacagcguagaggcagccccagauacaccaucuaccuuggauucggccaggaccugagcgccggcagacccaaagagaagucccugguacuggugaagcuagagcccuggcuguguagggugcaucuggaaggcacccaaagagagggcguaagcucgcuugacagcagcagccucagccugugccugagcagcgcuaacagcuuauacgacgacaucgagugcuuccugauggagcuggaacaacccgcc

SEQ ID NO: 1461 - RNA, 1059 nt, Artificial Sequence
  Synthetic: (truncated Hu IRF7 152-503; P039 without epitope tag; null mutation)
augggcggcccucccgggccuuuccuggcccauacacacgccggccuacaggcuccuggcccucugcccgccccggccggcgacaagggcgaccuccugcugcaggccgugcagcaguccugucuggccgaccaccugcugacugcuagcuggggcgccgaucccgugcccaccaaggccccaggagaggggcaagagggccugccucuaaccggcgcaugcgcagguggaccaggccuccccgccggcgagcuguaugguugggccguggagacaacccccagccccggcccgcagccugcugcgcugaccacaggcgaggccgcugccccugagagcccccaccaagcugaacccuaccugagccccagccccucugccugcacagcggugcaggagcccagucccggcgccuuggacgugaccaucauguauaagggcaggacuguguuacaaaagguagugggccacccaaguuguaccuuucuguacgggccccccgacccagccgugcgcgccaccgacccccagcagguggccuuccccagccccgcugaguugcccgaucagaaacaacuccgguacaccgaggaauuacuuagacauguggcucccggccugcaucuggagcuuagagguccacaguugugggccagaagaaugggcaagugcaagguuuauugggaggucggaggccccccgggcagcgccagccccagcacccccgccugucuucugcccagaaacugcgacaccccaaucuucgauuucagaguguuuuuccaggaacugguggaguucagagcaaggcaaagaagaggcagcccuagauacaccaucuaccugggcuuuggccaagaccugagcgccggcagacccaaggaaaaaucccugguccuggugaaacuggagcccuggcugugcagaguccaccuggagggcacccagagagagggcgugagcagccuggacucgagcagccugucccugugucugagcagcgcgaauucgcuauaugacgacaucgaaugcuuucugauggagcuggaacagcccgcc

SEQ ID NO: 1462 - RNA, 1269 nt, Artificial Sequence
  Synthetic: (KRAS(G12D)25mer_nt.STING(V155M))
augccucacagcagccuccacccuagcaucccuugcccuagaggccacggcgcccagaaggccgcccucgugcuuuuaagcgccugcuuggugacccuuuggggcuugggcgagccuccagagcacaccuugagauauuuggugcuccaccuggccagccuucagcugggcuuguuacucaacggcgugugcagccuggccgaggagcugagacacauccacagcagauacagaggcagcuacuggagaaccgugagagcgugucugggcugcccucugagaagaggcgccuugcuucuucucaguaucuacuucuacuacucccugccuaacgccgugggcccuccuuucaccuggaugcuggcacugcucggccucagccaggcccugaacaucuuguugggcuugaagggccuggccccugccgagaucagcgccgugugcgagaagggcaacuucaacauggcccacggauuggcuuggagcuacuacaucggcuaccugagacugauccugccugagcugcaggccagaaucagaaccuacaaccagcacuacaacaaccugcugcgcggcgcagugagccagagacuguauauucugcugccucuggacugcggcgugccugacaaccugagcauggccgacccuaacaucagauuccuggacaagcugccucagcagaccggcgaccacgccggcaucaaggacagaguguacagcaacagcaucuaugagcugcucgagaauggccagagagccggcaccugcgugcuggaguacgccaccccucugcagacccuguucgccaugagccaguauagucaagcuggcuucagcagagaggacagacuggagcaggccaagcuguucugcagaacccuggaggacauucuggcugacgccccugagagccagaacaacugccgacugaucgccuaccaggaaccagccgacgacagcagcuucagucuuucucaggagguucuucgccacuugcgccaggaggagaaggaggaggugaccgugggcagccugaagaccuccgcagucccuagcaccagcaccaugagucaggagccggagcuauuaaucagcggcauggagaagccucuuccacuccgaaccgacuucagcgccaccaacuucagccugcugaagcaggcaggugacguugaggagaauccgggaccuaugaccgaguacaagcuggugguugugggcgccgacggcgugggcaagagcgcccugaccauccagcugauccag

SEQ ID NO: 1463 - RNA, 1269 nt, Artificial Sequence
  Synthetic: (KRAS(G12D)25mer_ct.STING(V155M))
augaccgaguacaagcuaguagucgugggcgccgacggcgugggcaagagcgcccucaccauccagcuaauccaggccaccaacuucagcuugcucaagcaggccggcgacguggaggagaacccaggcccuaugccucacagcagccuucacccuagcaucccuugcccuagaggccacggcgcccagaaggccgcccuggugcugcugagcgccugccuggugacccuguggggccugggcgagccuccugagcacacccugagauaucuggugcuucaccuggccaguuuacagcugggccugcuucuuaacggcgugugcagccuggccgaggagcugagacacauccacagcagauacagaggcagcuacuggagaaccgugagagccugccuaggcugcccucugagaagaggcgcucuguugcuacuuuccaucuacuucuacuacucccugccuaacgccgugggcccuccuuucacuuggaugcuggcguugcugggucugagccaggcccugaacauccuucucggucugaagggccuggccccugccgagaucagcgccgugugcgagaagggcaacuucaacauggcccacggacucgccuggagcuacuacaucggcuaccugagacugauccugccugagcugcaggccagaaucagaaccuacaaccagcacuacaacaaccugcugcggggcgccgugagccagagacuguauauacuucuuccucuggacugcggcgugccugacaaccugagcauggccgacccuaacaucagauuccuggacaagcugccucagcagaccggcgaccacgccggcaucaaggacagaguguacagcaacuccauuuaugagcugcucgagaauggccagagagccggcaccugcgugcuggaguacgccaccccucugcagacccuguucgccaugagccaguacagucaggcuggauucagcagagaggacagacuggagcaggccaagcuguucugcaggacacuggaggacauacuagcagacgccccugagagccagaacaacugcagacugauugccuaccaggagccugcggacgacagcuccuucagucugagucaggagguguugcggcacuuacgccaagaagagaaggaggaggugaccgugggcagccugaagacuagcgcugugccuagcaccagcacaaugucacaggagccggaauugcuaaucagcggcauggagaagccucucccauuacguaccgacuucagc

SEQ ID NO: 1464 - RNA, 1419 nt, Artificial Sequence
  Synthetic: (KRAS(G12D)25mer^3_nt.STING(V155M))
augccucacagcagccuucacccuagcaucccuugcccuagaggccacggcgcccagaaggccgcccuagugcuccuuagcgccugccucgugacccuauggggcuuaggcgagccuccagagcacaccuugagauaccucguccuccaccuggcuagucuacagcugggccuucuccucaacggcgugugcagccuggccgaggagcugagacacauccacagcagauacagaggcagcuacuggagaaccgugagagcgugccugggcugcccucugagaagaggcgcacugcuguuacucagcaucuacuucuacuacucacugccaaacgccgugggcccuccuuucaccuggaugcuggccuugcucggauugagccaggcccugaacauuuuacugggauugaagggccuggccccugccgagaucagcgccgugugcgagaagggcaacuucaacauggcccacggccuagcuuggagcuacuacaucggcuaccugagacugauccugccugagcugcaggccagaaucagaaccuacaaccagcacuacaacaaccugcugcguggagcggugagccagagacuguauauccuccugccucuggacugcggagugccugacaaccugagcauggccgacccuaacaucagauuccuggacaagcugccucagcagaccggcgaccacgccggcaucaaggacagaguguacagcaacucaaucuacgagcuguuggagaauggccagagagccggcaccugcgugcuggaguacgccaccccucugcagacccuguucgccaugagccaguacucucaggcaggcuucagcagagaggacagacuggagcaggccaagcuguucugcagaacccuggaggacauccuggcggacgccccugagagccagaacaacugccggcuuaucgccuaccaggagccagcagacgacagcagcuucucucucucacaagagguacugcgccaucuucgccaggaggagaaggaggaggugaccgugggcagccugaagacauccgccguaccuagcaccagcaccaugucucaggaaccggaacuguugaucagcggcauggagaagccucugccacugcgcaccgacuucagcgccaccaacuucucccuacugaagcaagccggugacguugaagagaacccuggcccuaugaccgaguacaagcugguaguaguaggcgccgacggcgugggcaagagcgcccugaccauccagcugauccagaugacugaauauaagcuugucgucgugggcgcagauggcguugguaagagcgcacuuacaauucaacucauucagaugacggaguauaagcuggugguggucggagcugacggcguaggcaagagugcccuuacuauucagcuaauucag

SEQ ID NO: 1465 - RNA, 1419 nt, Artificial Sequence
  Synthetic: (KRAS(G12D)25mer^3_ct.STING(V155M))
augaccgaguacaagcuuguggugguuggcgccgacggcgugggcaagagcgccuuaaccauccagcuuauccagaugacagaguauaagcuagugguggucggcgcagacggagugggaaagagugcauuaacuauucaacucauccaaaugaccgaauacaagcuaguaguugugggugcagauggcgucggcaagucugcacugacaauucagcucauccaggccaccaacuucagccugcugaagcaggccggcgacguggaggagaacccuggcccuaugccucacagcagccugcacccuagcaucccuugcccuagaggccacggcgcccagaaggccgcccuggugcugcugagcgccugccuggugacccuguggggccugggcgagccuccugagcacacccugagauaccuaguuuugcaccuggcuucucugcagcugggccuacugcucaacggcgugugcagccuggccgaggagcugagacacauccacagcagauacagaggcagcuacuggagaaccgugagagcaugcuuaggcugcccucugagaagaggcgcucugcuccucuuguccaucuacuucuacuacucgcuaccuaacgccgugggcccuccuuucaccuggaugcuggcccucuugggauuaagccaggcccugaacaucuugcugggacugaagggccuggccccugccgagaucagcgccgugugcgagaagggcaacuucaacauggcccacggacucgcuuggagcuacuacaucggcuaccugagacugauccugccugagcugcaggccagaaucagaaccuacaaccagcacuacaacaaccugcugcggggagcagugagccagagacuguauauucugcucccucuggacugcggcgugccugacaaccugagcauggccgacccuaacaucagauuccuggacaagcugccucagcagaccggcgaccacgccggcaucaaggacagaguguacagcaacagcauuuacgagcugcuggagaacggccagagagccggcaccugcgugcuggaguacgccaccccucugcagacccuguucgccaugagccaguacucccaggcaggauucagcagagaggacagacuggagcaggccaagcuguucugccguacucuugaggacauccuugcagacgccccugagagccagaacaacugccgguugauugccuaccaggaaccggcagacgacagcucauucuccuugucucaggagguccuuagacaccugcggcaggaggagaaggaggaggugaccgugggcagccugaagacauccgccgugccuagcacgucuaccaugucccaggagccggaacugcuaaucagcggcauggagaagccucugccucucaggaccgacuucagc

SEQ ID NO: 1466 - RNA, 1140 nt, Artificial Sequence
  Synthetic: (Hu STING (R284K) var; no epitope tag)
augccccauagcagccugcaccccagcauccccugccccagaggccacggcgcccagaaggccgcccugguccugcugagcgcaugccuggucacccuguggggccugggcgagccccccgagcacacccugagauaccuggugcugcaccucgccagccugcagcugggccugcugcugaacggcgugugcagccuggccgaggagcugagacacauccacagcagauauagaggcagcuacuggagaaccgugagagcuugccucggcugcccccugagaagaggcgcccugcugcugcugagcaucuacuuuuacuacagccugcccaacgcugugggccccccuuucacguggaugcucgcccugcugggacugagccaggcccugaacauccugcugggccuuaagggccuagcccccgccgagaucagcgccgugugcgagaagggcaacuucaauguggcccacggccuggccuggagcuacuacaucggcuaccugagacugauccugcccgagcugcaggccagaaucagaaccuacaaucagcacuacaacaaccugcugagaggcgccgugagccagagacuguacauccugcugccccuggacugcggcgugcccgacaaccucagcauggccgaccccaacaucagauuccuggacaagcugccccagcagaccggcgaccacgccggcaucaaggaucgcguguacagcaacagcaucuacgagcugcuggaaaacggccagagagccggaaccugcgugcuggaguacgccacaccccugcagacccuguucgccaugagccaguacagccaggccggcuucagcagagaggacaagcuggagcaggccaagcuguucugcagaacccuggaggauauccucgccgacgcccccgagagccagaacaacugcaggcugaucgcguaccaggagcccgcugacgacagcagcuuuagccugagccaggaggugcugagacaucugcgucaagaggaaaaggaggaggugaccgugggcucccugaagaccagcgccgugcccagcaccagcaccaugagccaggagcccgagcugcugaucagcggcauggagaagccacugccccucagaaccgacuucagcacc

SEQ ID NO: 1467 - RNA, 1041 nt, Artificial Sequence
  Synthetic: DM_hsCASP1 (self-activating human Caspase 1); P2025 without epitope tag)
augagaaugaagcagcuggaggacaagaucgaggagcugcugagcaagaucuaccaccuggagaacgagaucgccagacugaagaagcugaucggcgaggccgaccagaccagcggcaacuaccugaacaugcaggacagccagggcgugcugagcagcuuccccgccccccaggccgugcaggacaaccccgccaugcccaccagcagcggcagcgagggcaacgugaagcugugcagccuggaggaggcccagagaaucuggaagcagaagagcgccgagaucuaccccaucauggacaagagcagcagaaccagacuggcccugaucaucugcaacgaggaguucgacagcauccccagaagaaccggcgccgagguggacaucaccggcaugaccaugcugcugcagaaccugggcuacagcguggacgugaagaagaaccugaccgccagcgacaugaccaccgagcuggaggccuucgcccacagacccgagcacaagaccagcgacagcaccuuccugguguucaugagccacggcaucagagagggcaucugcggcaagaagcacagcgagcaggugcccgacauccugcagcugaacgccaucuucaacaugcugaacaccaagaacugccccagccugaaggacaagcccaaggugaucaucauccaggccugcagaggcgacagccccggcguggugugguucaaggacagcgugggcgugagcggcaaccugagccugcccaccaccgaggaguucgaggacgacgccaucaagaaggcccacaucgagaaggacuucaucgccuucugcagcagcacccccgacaacgugagcuggagacaccccaccaugggcagcguguucaucggcagacugaucgagcacaugcaggaguacgccugcagcugcgacguggaggagaucuucagaaaggugagauucagcuucgagcagcccgacggcagagcccagaugcccaccaccgagagagugacccugaccagaugcuucuaccuguuccccggccac

SEQ ID NO: 1468 - RNA, 993 nt, Artificial Sequence
  Synthetic: (Caspase-4, N.del + DM domain; P2015 without epitope tag)
augagaaugaagcagcuggaggacaagaucgaggagcugcugagcaagaucuaucaccuggagaacgagaucgccagacugaagaagcugaucggcgagagacagaucagccccaacaagaaggcccaccccaacauggaggccggaccgccugagagcggcgagagcaccgacgcccugaagcugugcccccacgaggaguuccugagacugugcaaggagagagccgaggagaucuaccccaucaaggagagaaacaacagaaccagacuggcccugaucaucugcaacaccgaguucgaccaccugccccccagaaacggcgccgacuucgacaucaccggcaugaaggagcugcuggagggccuggacuacagcguggacguggaggagaaccugaccgccagagacauggagagcgcccugagagccuucgccaccagacccgagcacaagagcagcgacagcaccuuccuggugcugaugagccacggcauccuggagggcaucugcggcaccgugcacgacgagaagaagcccgacgugcugcuguacgacaccaucuuccagaucuucaacaacagaaacugccugagccugaaggacaagcccaaggugaucaucgugcaggccugcagaggcgccaacagaggcgagcugugggugagagacagccccgccagccuggagguggccagcagccagagcagcgagaaccuggaggaggacgccguguacaagacccacguggagaaggacuucaucgccuucugcagcagcaccccccacaacgugagcuggagagacagcaccaugggcagcaucuucaucacccagcugauaaccugcuuccagaaguacagcuggugcugccaccuggaggagguguucagaaaggugcagcagagcuucgagacccccagagccaaggcccagaugcccaccaucgagagacugagcaugaccagauacuucuaccuguuccccggcaac

SEQ ID NO: 1469 - RNA, 1440 nt, Artificial Sequence
  Synthetic: (hu-cFLIP-L; P1006 without epitope tag)
augagcgccgaggugauccaccagguggaggaggcccuggacaccgacgagaaggagaugcugcuguuccugugcagagacguggccaucgacguggugccccccaacgugagagaccugcuggacauccugagagagagaggcaagcugagcgugggcgaccuggccgagcugcuguacagagugagaagauucgaccugcugaagagaauccugaagauggacagaaaggccguggagacccaccugcugagaaacccccaccuggugagcgacuacagagugcugauggccgagaucggcgaggaccuggacaagagcgacgugagcagccugaucuuccugaugaaggacuacaugggcagaggcaagaucagcaaggagaagagcuuccuggaccuggugguggagcuggagaagcugaaccugguggcccccgaccagcuggaccugcuggagaagugccugaagaacauccacagaaucgaccugaagaccaagauccagaaguacaagcagagcgugcagggcgccggcaccagcuacagaaacgugcugcaggccgccauccagaagagccugaaggaccccagcaacaacuucagacugcacaacggcagaagcaaggagcagagacugaaggagcagcugggcgcccagcaggagcccgugaagaagagcauccaggagagcgaggccuuccugccccagagcauccccgaggagagauacaagaugaagagcaagccccugggcaucugccugaucaucgacugcaucggcaacgagaccgagcugcugagagacaccuucaccagccugggcuacgaggugcagaaguuccugcaccugagcaugcacggcaucagccagauccugggccaguucgccugcaugcccgagcacagagacuacgacagcuucgugugcgugcuggugagcagaggcggcagccagagcguguacggcguggaccagacccacagcggccugccccugcaccacaucagaagaauguucaugggcgacagcugccccuaccuggccggcaagcccaagauguucuucauccagaacuacguggugagcgagggccagcuggaggacagcagccugcuggagguggacggccccgccaugaagaacguggaguucaaggcccagaagagaggccugugcaccgugcacagagaggccgacuucuucuggagccugugcaccgccgacaugagccugcuggagcagagccacagcagccccagccuguaccugcagugccugagccagaagcugagacaggagagaaagagaccccugcuggaccugcacaucgagcugaacggcuacauguacgacuggaacagcagagugagcgccaaggagaaguacuacguguggcugcagcacacccugagaaagaagcugauccugagcuacacc

SEQ ID NO: 1470 - RNA, 681 nt, Artificial Sequence
  Synthetic: (hu-cFLIP-S(1-227); P1007 without epitope tag)
augagcgccgaggugauccaccagguggaggaggcccuggacaccgacgagaaggagaugcugcuguuccugugcagagacguggccaucgacguggugccccccaacgugagagaccugcuggacauccugagagagagaggcaagcugagcgugggcgaccuggccgagcugcuguacagagugagaagauucgaccugcugaagagaauccugaagauggacagaaaggccguggagacccaccugcugagaaacccccaccuggugagcgacuacagagugcugauggccgagaucggcgaggaccuggacaagagcgacgugagcagccugaucuuccugaugaaggacuacaugggcagaggcaagaucagcaaggagaagagcuuccuggaccuggugguggagcuggagaagcugaaccugguggcccccgaccagcuggaccugcuggagaagugccugaagaacauccacagaaucgaccugaagaccaagauccagaaguacaagcagagcgugcagggcgccggcaccagcuacagaaacgugcugcaggccgccauccagaagagccugaaggaccccagcaacaacuucagacugcacaacggcagaagcaaggagcagagacugaaggagcagcugggcgcccagcaggagcccgugaagaagagc

SEQ ID NO: 1471 - RNA, 588 nt, Artificial Sequence
  Synthetic: (hu-cFLIP-p22(1-198); P1008 without epitope tag) - nucleotide
augagcgccgaggugauccaccagguggaggaggcccuggacaccgacgagaaggagaugcugcuguuccugugcagagacguggccaucgacguggugccccccaacgugagagaccugcuggacauccugagagagagaggcaagcugagcgugggcgaccuggccgagcugcuguacagagugagaagauucgaccugcugaagagaauccugaagauggacagaaaggccguggagacccaccugcugagaaacccccaccuggugagcgacuacagagugcugauggccgagaucggcgaggaccuggacaagagcgacgugagcagccugaucuuccugaugaaggacuacaugggcagaggcaagaucagcaaggagaagagcuuccuggaccuggugguggagcuggagaagcugaaccugguggcccccgaccagcuggaccugcuggagaagugccugaagaacauccacagaaucgaccugaagaccaagauccagaaguacaagcagagcgugcagggcgccggcaccagcuacagaaacgugcugcaggccgccauccagaagagccugaaggac

SEQ ID NO: 1472 - RNA, 1128 nt, Artificial Sequence
  Synthetic: (hu-cFLIP-p43(1-376); P1009 without epitope tag) - nucleotide
augagcgccgaggugauccaccagguggaggaggcccuggacaccgacgagaaggagaugcugcuguuccugugcagagacguggccaucgacguggugccccccaacgugagagaccugcuggacauccugagagagagaggcaagcugagcgugggcgaccuggccgagcugcuguacagagugagaagauucgaccugcugaagagaauccugaagauggacagaaaggccguggagacccaccugcugagaaacccccaccuggugagcgacuacagagugcugauggccgagaucggcgaggaccuggacaagagcgacgugagcagccugaucuuccugaugaaggacuacaugggcagaggcaagaucagcaaggagaagagcuuccuggaccuggugguggagcuggagaagcugaaccugguggcccccgaccagcuggaccugcuggagaagugccugaagaacauccacagaaucgaccugaagaccaagauccagaaguacaagcagagcgugcagggcgccggcaccagcuacagaaacgugcugcaggccgccauccagaagagccugaaggaccccagcaacaacuucagacugcacaacggcagaagcaaggagcagagacugaaggagcagcugggcgcccagcaggagcccgugaagaagagcauccaggagagcgaggccuuccugccccagagcauccccgaggagagauacaagaugaagagcaagccccugggcaucugccugaucaucgacugcaucggcaacgagaccgagcugcugagagacaccuucaccagccugggcuacgaggugcagaaguuccugcaccugagcaugcacggcaucagccagauccugggccaguucgccugcaugcccgagcacagagacuacgacagcuucgugugcgugcuggugagcagaggcggcagccagagcguguacggcguggaccagacccacagcggccugccccugcaccacaucagaagaauguucaugggcgacagcugccccuaccuggccggcaagcccaagauguucuucauccagaacuacguggugagcgagggccagcuggaggacagcagccugcuggagguggac

SEQ ID NO: 1473 - RNA, 315 nt, Artificial Sequence
  Synthetic: (hu-cFLIP-p12(377-480); P1010 without epitope tag) - nucleotide
augggccccgccaugaagaacguggaguucaaggcccagaagagaggccugugcaccgugcacagagaggccgacuucuucuggagccugugcaccgccgacaugagccugcuggagcagagccacagcagccccagccuguaccugcagugccugagccagaagcugagacaggagagaaagagaccccugcuggaccugcacaucgagcugaacggcuacauguacgacuggaacagcagagugagcgccaaggagaaguacuacguguggcugcagcacacccugagaaagaagcugauccugagcuacacc

SEQ ID NO: 1474 - RNA, 1755 nt, Artificial Sequence
  Synthetic: (huRIPK1(1-555).IZ.TM; TH1021 without epitope tag) nucleotide
augcagcccgacaugagccugaacgugaucaagaugaagagcagcgacuuccuggaaucggccgagcuggacagcggcggcuucggcaaggugagccugugcuuccacagaacucagggccugaugaucaugaagaccguguacaagggccccaauugcaucgagcacaacgaggccuuacuggaggaggccaagaugaugaacagacugagacauucgagaguggucaaguuacugggcgugaucaucgaggaaggcaaguacagccuggugauggaguacauggaaaagggcaaccugaugcacgugcugaaggccgagaugagcaccccccugagcgugaagggcagaaucauccuggagauuaucgaggggaugugcuaccugcacggcaagggcgugauccacaaggaccugaagccggagaacauccugguggacaacgacuuccacaucaagaucgccgaccugggccuggccagcuuuaagauguggagcaagcugaacaacgaggagcacaacgaguuaagagagguggacggcaccgccaagaagaacggcggcaccuuauacuacauggcccccgagcaccugaacgaugugaacgccaagcccaccgagaagagcgacguguacuccuuugccgugguccugugggccaucuucgccaacaaggagcccuacgagaacgccauuugcgagcagcagcugaucaugugcauuaagagcggcaacagacccgacguggacgacaucaccgaguacugccccagagagauuaucagccugaugaagcugugcugggaggccaaccccgaggcuagacccaccuucccugggaucgaggagaaauucagacccuucuaccugagccagcuggaggagagcguggaagaggacgugaagagccugaagaaagaguacagcaacgagaacgcuguggugaagcgcaugcagagccugcagcuggacugcguggccguccccagcagcagaagcaacagugccaccgagcagccgggcucgcugcacuccagccagggccugggcaugggccccguggaggagagcugguucgcccccucgcuggagcacccccaggaggagaacgaaccuagccugcagagcaagcugcaggacgaggccaacuaccaccuguacggcagcagaauggacagacagaccaagcagcaaccaagacagaacguggccuacaacagagaggaggaacgaagaagaagagugagccacgaccccuucgcccagcagagacccuacgagaacuuccagaacaccgagggcaagggcaccgccuauagcagcgccgccagccacggcaacgcagugcaccagcccagcggccugaccucucagccccaggugcuguaccagaauaauggccuguauagcagccacggcuucggcaccagaccccuggacccaggcaccgccggcccuagagugugguacagacccaucccaagccacaugcccagccugcacaacauaccggugcccgagacaaacuacuugggcaacacccccaccaugcccuucagcagccugccccccacagacgagagcaucaaguacaccaucuauaacagcaccggcauccagaucggcgccuacaacuauauggagaucggcgguaccagcagcagcggcggcaucaagaaggagauagaggcaaucaagaaggagcaggaggccaucaagaagaagaucgaagccaucgagaaggagauugaggcc

SEQ ID NO: 1475 - RNA, 1827 nt, Artificial Sequence
  Synthetic: (huRIPK1(1-555).EE.DM; TH1022 without epitope tag) - nucleotide
augcagcccgacaugagccugaaugugaucaagaugaagagcagcgacuuccuggagagcgccgagcuggauagcggcggauucggcaaggugagccugugcuuccacagaacccaaggccugaugaucaugaagaccguguacaagggacccaacugcaucgagcacaacgaagcccuguuagaggaagccaagaugaugaauagacugcgucacucuagggugguuaaacugcugggcgugaucaucgaggagggcaaguacagccuggugauggaguacauggagaagggcaaccuuaugcacgugcugaaggccgagauguccaccccccugagcgugaagggcagaaucauccuggagaucaucgagggaauguguuaucugcauggcaagggcgugauccacaaagaccugaagcccgagaacauccugguggacaacgauuuccacaucaagaucgccgaccugggccuggccagcuucaagauguggagcaagcugaacaacgaggagcacaacgaacugagagagguggauggcaccgccaagaaaaacggcggcacccuguauuacauggcccccgagcaccugaacgacgugaacgccaagcccaccgagaagagcgacguuuacagcuuugccguggugcugugggccaucuucgccaacaaggagcccuacgagaacgccaucugcgagcagcagcugaucaugugcaucaagagcggcaacagacccgacguggacgacaucaccgaguacugcccccgugagaucauuagccugaugaagcugugcugggaggccaaccccgaggccagacccaccuuccccggcauugaggagaaguucagacccuucuaccugagccaguuagaggaaagcguggaggaggacgugaaaagccugaagaaagaguacucuaacgagaacgccguggugaaacgcaugcagagccugcagcuggauugcguggccgugcccagcuccagaagcaacagcgccaccgaacaaccuggcagccugcacagcucccagggccugggcaugggccccguggaggagagcugguucgcccccucccuggagcauccgcaggaggagaacgagcccucucugcaguccaagcugcaagacgaggccaacuaccaccuguacggcagcagaauggacagacagaccaagcagcaacccagacaaaauguggccuacaauagagaggaggagagaagaagaagagugagccacgacccuuucgcccagcagagacccuacgagaacuuccagaauaccgagggcaaggguaccgccuacagcucagcggccucgcacggcaacgccgugcaccagcccagcggccugaccagccagccccaggugcuguaccaaaacaacggccuguauagcucccacggcuuuggcaccagaccccuggaccccggcaccgccggccccagagucugguauagacccauccccagccauaugccuagccugcacaacauccccgugcccgagaccaacuaccugggcaauacccccaccaugccguucagcagcuuaccccccaccgacgagagcaucaaguacaccaucuacaacagcaccggcauccagaucggcgccuacaacuacauggaaaucggcggaaccagcagcagcggcagcgacggcagcggcuccggaagcggaagcauaaccaucagggccgccuuccuggagaaggaaaauaccgcgcugagaacagagauugccgaguuagaaaaggaggugggcagaugcgagaacauagugagcaaguacgagaccagauacggcccccug

SEQ ID NO: 1476 - RNA, 1827 nt, Artificial Sequence
  Synthetic: (huRIPK1(1-555).RR.DM; TH1023 without epitope tag) - nucleotide
augcaacccgacaugagcuugaacgugaucaagaugaagagcagcgauuuccuggagagcgccgagcuggacagcggcggcuucggcaaggugagccuguguuuccacagaacccagggccugaugaucaugaagacaguguacaagggccccaacugcaucgagcacaacgaggcccugcuggaggaggcuaagaugaugaacagacugagacacagcagagucgugaagcugcugggcgugaucaucgaagagggcaaguacagccuggugauggaguacauggagaaaggcaaccuuaugcacgugcucaaggccgagaugagcaccccucugagcgugaagggaagaaucauccuggagaucaucgagggcaugugcuaccugcacggcaagggcgucauccauaaggaccugaagcccgagaauauccuuguggacaacgacuuccauaucaagaucgccgaccucggccuggccagcuucaagauguggagcaagcugaacaacgaggagcacaacgagcugagagagguagacggcaccgccaagaaaaauggcggcacccuguacuacauggcucccgagcaccugaaugacgugaacgccaagccuaccgaaaagagcgacguguauagcuucgccguggugcucugggccaucuucgccaacaaggagccuuaugagaaugcaaucugcgagcagcagcugaucaugugcaucaagagcggcaacagacccgacguggacgacaucaccgaauacugccccagagagaucaucagccugaugaagcugugcugggaggccaaccccgaggccagacccaccuuccccggcauugaggagaaguucagacccuucuaccugagccaguuggaagagagcguggaggaggacgucaaaagccugaagaaggaguacagcaacgagaacgccgucgugaagagaaugcagagccugcagcuggacugcguggccgugccuagcagcagaagcaacagcgccaccgagcagcccggcagccugcacagcagccagggccuuggaaugggccccguggaggaaagcugguucgcccccagccuugagcauccgcaggaggagaacgagcccagccugcagagcaagcugcaggacgaagccaacuaucaccuguacggcagcagaauggaccgacagaccaagcagcagcccagacagaacguggccuauaaccgagaggaggagagaagaagaagggugagccacgaccccuucgcccaacagagacccuacgagaacuuccagaacaccgagggcaagggcaccgcuuacaguagcgccgcaagccacggcaacgccgugcaccaaccuagcggacugaccagccagccccaggugcuguaccaaaacaacggucuguacagcucacacggcuucgggaccagacccuuagaucccggaaccgccggccccagaguaugguauagacccauccccagccacaugcccagcuugcacaacauccccgugcccgagaccaacuaccugggcaacacccccaccaugcccuucagcagccugccccccaccgacgagagcaucaaauauaccaucuacaacagcaccggaauccagaucggggccuacaauuacauggagaucggaggcaccagcagcagcggcagcgacgguagcggaagcggcagcggcagccucgagaucagagccgccuuccuggagaaggagaacaccgcccugagaaccagagccgccgaacugagaaagagagugggcagaugcagaaacaucgugagcaaguacgagaccagauacggcccccug

SEQ ID NO: 1477 - RNA, 1755 nt, Artificial Sequence
  Synthetic: (msRIPK1(1-555).IZ.TM; TH1024 without epitope tag) - nucleotide
augcagccugacaugagccuggacaauaucaagauggccagcagcgaccugcucgagaagaccgaccuggacaguggcggcuucggaaaagugagccugugcuaccacaggucucacggguucgugauccugaagaagguguacaccggccccaacagagccgaguauaaugaggugcugcuggaggagggcaagaugaugcacagacugagacauagcagaguggugaagcugcugggcaucaucaucgaggagggaaacuacagccugguuauggaguacauggagaagggcaaccuaaugcacguguugaagacccagauagacgugccacugagcuuaaagggcagaaucaucguggaggcuaucgagggcaugugcuaccugcacgacaagggcgugauccacaaagaccugaagcccgagaacauacucguggauagagauuuccacaucaagaucgccgaccugggcguggccagcuucaagacuuggagcaagcugacaaaggagaaggacaacaagcagaaggaggugagcagcaccaccaagaaaaacaacggcggcacccuguacuacauggccccugagcaccugaacgacaucaacgccaagcccaccgagaagagcgacguguauagcuucggcaucgugcugugggccaucuuugcuaagaaagagcccuacgagaacgugaucugcaccgagcaguucgucaucugcaucaagagcggcaacagacccaauguggaggagauccuggaauacugccccagagagaucaucagccucauggagagaugcuggcaggccaucccugaggacagacccaccuuccugggcauugaggaggaguucagacccuucuaccugagccacuucgaggaguacguggaggaggacguggccagucugaaaaaggaguauccagaccagagccccgugcugcagagaauguucagccugcagcacgacugugugccccugccccccagcagaagcaacagcgagcagccgggcagccugcacagcagccagggcuuacaaaugggacccguggaggagagcugguucagcaguagccccgaguacccccaggacgagaacgacaggucgguccaggccaagcuccaggaagaggccagcuaccacgccuucggcaucuucgccgagaagcaaaccaagccccagcccagacaaaacgaagccuacaacagagaggaagagagaaagagacgcguaagccacgaccccuuugcccaacagagagccagagaaaacaucaagagcgccggcgcccggggccacucggauccgagcaccacuagcagaggcaucgcugugcagcaacucagcuggcccgccacccagaccguguggaacaacggccuguacaaccagcacggcuucggcaccaccggcaccggcguuugguacccccccaaccugucgcagauguacagcaccuacaaaacccccgugcccgagaccaacauccccggcagcacccccaccaugcccuauuucagcggccccguggccgacgaccugaucaaguacaccaucuucaacagcagcggcauccagaucggcaaccacaauuacauggacgugggccugaacagccagccacccaacaacaccugcaaggaagaaagcaccagcggcggcaucaagaaggaaaucgaggccaucaagaaggagcaggaagccauaaagaagaaaaucgaggccaucgagaaggagaucgaggcc

SEQ ID NO: 1478 - RNA, 1827 nt, Artificial Sequence
  Synthetic: (msRIPK1(1-555).EE.DM; TH1025 without epitope tag) - nucleotide
augcagcccgacaugagccuggacaacauuaagauggccaguagcgaccugcuggagaagaccgaccuggauagcgggggcuucggcaaggugagccugugcuaccacagaagccacggauucgugauccugaagaagguguacaccggccccaacagagccgaguacaacgaggugcugcuggaggagggcaagaugaugcauagacugagacacagcagaguggugaaacugcuggggaucaucaucgaagagggcaacuauagccuggugauggaauacauggagaagggcaaccugaugcacgugcugaagacccagaucgacgugccccugagccugaagggcagaaucaucguggaggccaucgaggguaugugcuaccugcacgauaagggcgugauccacaaggaccugaaaccugaaaacaucuuaguggacagagacuuccacaucaagaucgccgaccugggaguggcuagcuucaagaccuggagcaaacugaccaaggagaaggauaacaagcagaaggaagugagcagcaccaccaagaaaaacaacggaggcacccuguacuacauggcccccgagcaucugaacgacaucaacgccaagcccaccgagaagagcgacguguacuccuucggcaucgucuuaugggccaucuucgccaagaaggagcccuacgagaacgugaucugcaccgaacaguuugugaucugcaucaagagcggcaauagacccaacguggaggagauccuggaguacugccccagagagaucaucagccugauggagaggugcuggcaggcuauccccgaggacagacccaccuuucugggcaucgaggaagaguucagacccuucuaucugagccacuucgaggaguauguugaggaggacguggccagccugaagaaggaguaccccgaccagagccccgugcugcagagaauguucagccugcaacacgauugcgugccgcugccccccagcagaucgaauagcgagcagccaggcagccuacacagcagucagggccugcagaugggccccguggaggaaagcugguucagcagcagccccgaguacccccaggacgagaaugacagaagcgugcaagcaaagcugcaagaggaggccagcuaccacgccuucggcaucuucgccgagaaacagacuaagccccagcccagacagaacgaggccuacaacagagaggaggagagaaaaagacgagugagccacgaccccuucgcccagcagagagccagagagaauaucaagagcgccggcgccagaggccacagcgaccccagcaccaccagcagaggaaucgccgugcagcagcugagcuggcccgccacccagaccguguggaacaacggccuguacaaccagcacggcuuuggcaccaccggcaccggcgugugguauccccccaaccugagccagauguacagcaccuauaaaaccccugugccggagaccaauauccccggcagcaccccuaccaugcccuacuucagcggccccguggccgacgaccugaucaaguacacgaucuucaacagcagcggcauccagauaggcaaccacaacuacauggacgugggccugaacagccaaccccccaauaacaccugcaaggaggaguccaccagcggcagcgacggcagcggcagcggcagcggcagcauaaccaucagagcugcuuuccuggagaaggagaacaccgcucugagaaccgagaucgccgagcuggagaaggaggucggcagaugcgagaauaucgugagcaaguacgagaccagauacggaccccug

SEQ ID NO: 1479 - RNA, 1827 nt, Artificial Sequence
  Synthetic: (msRIPK1(1-555).RR.DM; TH1026 without epitope tag) - nucleotide
augcagccugauaugagccuggacaacaucaagauggccagcagcgacuugcuggagaagaccgaucuggacuccggcggcuuuggcaaggugagccuguguuaccacagaagccacggcuucgugauccugaaaaagguguacaccggccccaauagagcagaguacaacgaggugcugcuggaggagggcaagaugaugcacagacugaggcauagcagaguggugaaacugcugggcaucaucauugaggagggcaacuacagccuggugauggaguacauggagaagggcaaccugaugcaugugcugaagacccaaaucgacgugccccugucgcugaagggcagaaucaucguggaggccaucgaggggaugugcuaccugcacgacaagggcgugauccacaaggaccugaagcccgagaacauccugguggauagagacuuccacaucaagaucgccgaccugggcguugccagcuucaagaccuggucuaaacugaccaaggagaaagacaacaagcagaaggaggugagcagcaccaccaagaagaacaacggcggaacacuguacuauauggccccugagcaccugaacgacaucaacgccaagcccaccgagaaaagcgauguuuacagcuucggcaucgugcugugggccaucuucgccaagaaggagcccuacgagaacgugaucugcaccgagcaguucgugaucugcaucaagagcggcaacagacccaacguggaggaaauccuggaguacugccccagagagaucaucagccugauggagagaugcuggcaggccauccccgaggaccgucccacguuccugggcaucgaagaggaguuccggcccuucuaccugagccauuucgaggaguauguggaggaggacguggccagccugaagaaggaguaccccgaccagagcccagugcugcagagaauguucagccuucaacacgacugcgugccccugccucccucaagaagcaacagcgagcagcccggcagcuugcacagcagccagggccugcagaugggccccguggaggagagcugguuuagcagcagccccgaguacccccaggacgagaaugacagaagcgugcaagccaaguuacaggaggaggccagcuaccacgccuuuggaaucuucgccgagaagcagaccaagccccagcccagacagaacgaggccuacaacagagaggaggagagaaaaagaagagugagccacgaccccuucgcccagcagagagccagagagaacauuaagagcgccggcgcgagaggccacagcgaccccagcaccacaagcagaggcaucgccgugcagcaauugagcuggcccgccacccagaccguguggaacaacggccuguauaaccagcacggcuucggaaccaccggcaccggcgugugguacccccccaaucugagccagauguacagcacuuacaagacccccgugcccgaaaccaacauccccggcagcacccccaccaugcccuacuucagcggccccguggccgacgaccucaucaaguacacaauauuuaacagcagcggcauccagaucggcaaccacaacuacauggacgugggccugaacagccagcccccgaacaauaccugcaaggaggagagcacaagcggcucugacggcagcggcagcggcagcggcucacuggagaucagagcugccuuccuggaaaaggagaacaccgcucugagaaccagagccgccgagcugcgaaagagaguaggcagaugcagaaacaucgugagcaaguacgagaccagauacgguccccug

SEQ ID NO: 1480 - RNA, 888 nt, Artificial Sequence
  Synthetic: (human myd88(L265P); P4027 without epitope tag) - nucleotide
augagcgccggcgaccccagagugggcagcggcagccuggacagcuucauguucagcaucccccugguggcccugaacgugggcgugagaagaagacugagccuguuccugaaccccagaacccccguggccgccgacuggacccugcuggccgaggagaugggcuucgaguaccuggagaucagagagcuggagaccagacccgaccccaccagaagccugcuggacgccuggcagggcagaagcggcgccagcgugggcagacugcuggagcugcuggcccugcuggacagagaggacauccugaaggagcugaagagcagaaucgaggaggacugccagaaguaccugggcaagcagcagaaccaggagagcgagaagccccugcagguggccagaguggagagcagcgugccccagaccaaggagcugggcggcaucaccacccuggacgacccccugggccagacccccgagcuguucgacgccuucaucugcuacugccccaacgacaucgaguucgugcaggagaugaucagacagcuggagcagaccgacuacagacugaagcugugcgugagcgacagagacgugcugcccggcaccugcguguggagcaucgccagcgagcugaucgagaagagaugcagaagaaugguggugguggugagcgacgacuaccugcagagcaaggagugcgacuuccagaccaaguucgcccugagccugagccccggcgugcagcagaagagacccauccccaucaaguacaaggccaugaagaaggacuuccccagcauccugagauucaucaccaucugcgacuacaccaaccccugcaccaagagcugguucuggaccagacuggccaaggcccugagccugccc

SEQ ID NO: 1481 - RNA, 696 nt, Artificial Sequence
  Synthetic: (Mouse TRAM (TICAM2); P4033 without epitope tag) - nucleotide
augggcgugggcaagagcaagcuggacaagugcccccugagcuggcacaagaaggacagcguggacgccgaccaggacggccacgagagcgacagcaagaacagcgaggaggccugccugagaggcuucguggagcagagcagcggcagcgagccccccaccggcgagcaggaccagcccgaggccaagggcgccggccccgaggagcaggacgaggaggaguuccugaaguucgugauccugcacgccgaggacgacaccgacgaggcccugagagugcaggaccugcugcagaacgacuucggcaucagacccggcaucguguucgccgagaugcccugcggcagacugcaccugcagaaccuggacgacgccgugaacggcagcgccuggaccauccugcugcugaccgagaacuuccugagagacaccuggugcaacuuccaguucuacaccagccugaugaacagcgugagcagacagcacaaguacaacagcgugauccccaugagaccccugaacagcccccugcccagagagagaaccccccuggcccugcagaccaucaacgcccuggaggaggagagccagggcuucagcacccagguggagagaaucuucagagagagcguguucgagagacagcagagcaucuggaaggagaccagaagcgugagccagaagcaguucaucgcc

SEQ ID NO: 1482 - RNA, 1134 nt, Artificial Sequence
  Synthetic: (human TAK1-TAB1; P4031 without epitope tag) - nucleotide
augagcaccgccagcgccgccagcucaagcuccuccucuagcgccggcgagaugaucgaggcccccagccaggugcugaacuucgaggagaucgacuacaaggaaaucgagguggaggagguggugggcagaggcgccuucggcguggugugcaaggccaaguggagagccaaggacguggccaucaagcagaucgagagcgaguccgagagaaaggccuucaucguggagcugagacagcugagcagagugaaccaccccaacaucgugaagcuguacggcgccugccugaaccccgugugccuggugauggaguacgccgagggcggcagccuguacaacgugcugcacggcgccgagccccugcccuacuacaccgccgcccacgccaugagcuggugccugcagugcagccagggcguggccuaccugcacagcaugcagcccaaggcccugauccaccgcgaucugaagccccccaaccugcugcugguggccggcggcaccgugcugaagaucugcgacuucggcaccgccugcgacauccagacccacaugaccaacaacaagggaucagcugcguggauggcccccgagguguucgagggcagcaacuacagcgagaagugcgacguguucagcuggggcaucauccugugggaggugaucaccagaagaaagcccuucgacgagaucggcggccccgccuucagaaucaugugggccgugcacaacggcaccagaccgccgcugaucaagaaccugcccaagcccaucgagucccugaugaccagaugcuggagcaaggacccgagccagaggcccagcauggaagagaucguuaagaucaugacccaccugaugagauacuucccgggcgccgaugaaccgcugcaguaccccugccaggaguucggcggaggcggcggccagagccccacccugacccugcagagcaccaacacccacacccagagcagcagcaguagcagcgacggcggccuguucagaagcagacccgcccacagccugccccccggcgaggacggcagaguggagcccuacguggacuucgccgaguucuacagacuguggagcguggaccacggcgagcagagcguggugaccgccccc

SEQ ID NO: 1483 - RNA, 537 nt, Artificial Sequence
  Synthetic: (human MLKL(1-180) ORF nucleotide sequence; no epitope tag)
auggagaaccugaagcacaucaucacccugggccaggugauccacaagagaugcgaggagaugaaguacugcaagaagcagugcagaagacugggccacagagugcugggccugaucaagccccuggagaugcugcaggaccagggcaagagaagcgugcccagcgagaagcugaccaccgccaugaacagauucaaggccgcccuggaggaggccaacggcgagaucgagaaguucagcaacagaagcaacaucugcagauuccugaccgccagccaggacaagauccuguucaaggacgugaacagaaagcugagcgacguguggaaggagcugagccugcugcugcagguggagcagagaaugcccgugagccccaucagccagggcgccagcugggcccaggaggaccagcaggacgccgacgaggacagaagagccuuccagaugcugagaagagacaacgagaagaucgaggccagccugagaagacuggagaucaacaugaaggagaucaaggagacccugagacaguac

SEQ ID NO: 1484 - RNA, 2187 nt, Artificial Sequence
  Synthetic: (CA-hMAVS ORF nucleotide sequence; no epitope tag)
auggagcacgaccuugagagaggcccuccgggcccuagaagaccuccucgagguccuccacuuagcagcagcuugggccucgcucucuuauuguugcuacuugccuuguuguucugguuguacaucgugaugagcgacuggaccggcggcgcccuucuggugcuguacagcuucgcccugaugcugaucauuaucauacugauuaucuucauauucagaagagaucugcugugcccucugggcgccuuaugcauucugcuuuugaugaucacucugcuccucaucgcacucuggaaccugcacggccaggcccuguuccugggcaucgugcuguucaucuucggcugccuccucgugcuuggaaucuggaucuaccugcuggagaugcuguggagacuaggugccaccaucuggcagcugcuggccuucuuccuggcauucuucuuagaccugauucugcucauuauugcccuauaccugcagcagaacugguggacccuacucguugaucuccuguggcuacugcuguuccuugcuauccugauuuggauguacuaccacggacaaagaccuuucgccgaggacaagaccuacaaguacaucugcagaaacuucagcaacuucugcaacguggacgugguggagauccugccuuaccugccuugccugaccgccagggaccaggacagacugagagccaccugcacccugagcggcaacagagacacccuguggcaccuguucaacacccugcagaggcgcccuggcuggguggaguacuucaucgccgcccugagaggcugcgaguugguugaccucgccgacgagguggccagcguguaccagagcuaccagccuagaaccagcgacaggccgccugacccucuggagccuccuagccugccugccgaacggccuggcccaccuaccccugccgccgcccacagcaucccuuacaacuccugucgggagaaggagccuagcuacccuaugccugugcaggaaacgcaggccccagaaaguccuggcgagaacagcgagcaggccuugcagacucugagcccuagagccaucccuagaaacccugacggcgguccucucgagaguuccagcgaccuggcugcacucuccccacugaccagcagcggccaccaggagcaggacaccgagcugggcagcacccacaccgccggcgcuaccucaagccuuaccccuagccggggcccagucagcccuagcgugagcuuccagccucuggccagaagcacaccaagagccagcagacuuccaggaccaaccggcagcguggugagcaccggcaccagcuucaguuccucuagcccaggcuuagccagcgccggagcggccgagggcaagcagggcgccgagagcgaccaggccgagccuaucaucuguuccucgggugccgaggccccugccaacagccuaccuagcaaggugccuaccacacugaugccaguuaacaccguggcccugaagguuccagccaacccugcuuccguuucuacagugccguccaagcugccgacgucauccaagccuccgggagccgugccaucuaacgcccugaccaauccagcuccaagcaagcucccaaucaacagcaccagagccggcauggugccuucaaaggugccgaccuccauggugcugaccaaggugagcgccucuaccgugccaaccgacggaucuucucggaacgaggagacaccugcugcuccuacuccagcgggcgcaacuggaggcuccucggcuuggcuggacaguucuagcgagaauagaggccuggguagugagcugaguaagccgggcgugcucgcaagccagguggacagcccuuucagcggcugcuucgaagaccuugcaauuuccgcaucuaccagucuaggcaugggcccuugccacggcccugaggagaacgaguacaagagcgagggcaccuucggcauccacguggccgagaacccuagcauccagcugcuugagggcaauccuggaccaccagccgauccugauggcggaccuagaccucaggccgacagaaaguuccaggagagagaggugccuugucauagaccuuccccaggcgcucuuuggcugcagguggccgugaccgguguccucgucgugacauuacugguggugcucuacagaagaagacugcac

SEQ ID NO: 1485 - RNA, 2268 nt, Artificial Sequence
  Synthetic: (huIKK2ca(S177E/S181E); P4005 without epitope tag) nucleotide
augagcugguccccaagccucacgacccagaccugcggcgcuugggagaugaaggagagacugggcacggggggcuuuggcaacgugaucagauggcauaaucaggaaaccggagagcagauugcuaucaagcaguguagacaggagcuaagcccccgcaauagagagagguggugccuggaaauucagauuaugagaagacugacccaucccaauguggucgccgcaagagacguccccgaaggcaugcagaaccuggcccccaaugaccugccucuucuggccauggaauacugccagggcggcgaccugcggaaguaccugaaucaguuugaaaauugcugcggccugagagagggcgccauauugacacugcugagcgacaucgccagcgcccugagauaccugcacgagaacagaauaauucacagagaccugaagccggagaauauugugcugcagcagggugaacagaggcucauccauaagaucaucgaccugggguacgccaaggagcuggaucagggcgagcuguguaccgaguuuguggggacucugcaauaccuggcccccgagcuccuggaacagcagaaguacaccgucacaguggauuauuggagcuucggcacgcuggccuucgagugcaucacgggcuuuaggccguuucugcccaauuggcagcccgugcaauggcacagcaaggucagacagaaaagcgaggucgacaucguagugagcgaagaccugaacggcacugucaaguucaguagcucccuccccuacccuaacaaucugaacagcgugcuggcagagcggcuggagaaguggcuacaacuaaugcugauguggcacccccgacagcguggcaccgaccccaccuacgggcccaacggaugcuucaaggcccuggacgacauucucaaccugaagcuggugcacaucuugaauauggugaccggcaccauccacaccuaccccgugaccgaagacgaaagcuugcagagccugaaggccagaauucaacaggacacaggcauccccgaagaggaucaagagcugcugcaggaagccggccuggcuuugauucccgacaaaccagccacccagugcauuagcgacggcaagcugaacgagggccacacccuggacauggaccugguguuccuguucgacaacagcaagauuaccuacgagacccaaaucagcccaaggccccaacccgagagcgugagcugcauccugcaagagcccaagaggaaucuggccuucuuccaacuaagaaagguguggggccaaguguggcacagcauccagacucugaaggaagacugcaauagacugcaacaaggacagcgagccgccaugaugaaccuguuaagaaacaacagcugcuuaucuaagaugaagaacagcauggccuccaugagccagcagcugaaagccaaacuggauuucuucaagaccagcauccagaucgaccuggagaaguacagcgagcagacggaguucgggaucaccagcgacaagcugcugcuggcuuggagggaaauggaacaggccguggagcugugcggcagagagaacgagguuaaacugcugguagagcggaugauggcccugcagaccgacauuguagaccuccagagaagcccuaugggaagaaaacagggcggaacacuggacgaccuggaggagcaggcuagagagcuguacagaagacuuagagagaagcccagagaccaaagaaccgagggcgacagccaggagauggugagacugcugcuacaggcuauucaaaguuucgagaagaaagugagagugaucuacacccaacucagcaaaaccgugguguguaagcagaaggcccuggagcugcugcccaagguugaggagguugucagccugaugaaugaggaugagaagaccguggugagacugcaagagaaaaggcagaaagaacuguggaaccuuuuaaagauugccugcagcaaggugaggggcccuguaucaggaucccccgacucuaugaacgccagcagacugagccagcccggucaacugaugagccagcccucuaccgccagcaacucccugcccgagccagccaagaagagcgaggaacugguggccgaggcccacaaucugugcacccuacuggagaacgccauucaggacaccguucgcgagcaggaccagagcuucaccgcccuggacuggagcuggcugcagacugaggaggaagagcacagcugccuggagcaggccagc

SEQ ID NO: 1486 - RNA, 1548 nt, Artificial Sequence
  Synthetic: (muRIPK3-IZ.Trimer; TH1015 with no epitope tag) - nucleotide
augagcagcgugaagcucuggcccaccggcgccagcgccgugccccuagugagccgggaggagcuuaagaagcucgaguucgugggcaagggcggcuucggcgugguguuccgggcccaccaccggaccuggaaccacgacguggccgugaagaucgugaacagcaagaagaucagcugggaggugaaggccauggugaaccugcggaacgagaacguguugcugcugcugggcgugaccgaggaccugcagugggacuucgugagcggccaggccuugguuacccgguucauggagaacggcagccuggccggccugcugcagcccgagugcccccggcccuggccccugcugugccggcuacugcaggagguggugcugggcaugugcuaccugcacagccugaaccccccacuucugcaccgggaccugaagcccagcaacauccugcuggaccccgagcugcacgccaagcuggccgacuucggccugagcaccuuccagggcggcagccagagcggcuccggaucuggcagcggaagccgggacagcggcggcacccuggccuaccuggacccagagcugcuguucgacgugaaccucaaggccagcaaggccuccgacguguacagcuucggcauccuggugugggccgugcuggcuggaagggaggccgagcugguggacaagaccagccugauccgggagacagugugcgaccggcagagccggccuccucucaccgaacugccccccggcagccccgagacuccuggccuggagaagcugaaggagcucaugauccacugcuggggcucccagagcgagaaccggcccagcuuccaggacugcgagcccaagaccaacgagguguacaaccuggugaaggacaagguggacgccgccgugagcgaggucaagcacuaccugagccagcaccggagcagcggccggaaccugagcgcccgggagcccagccagcggggcaccgagauggacuguccucgcgagacaauggugagcaagaugcuggaucggcugcaccuggaggagccuucaggccccgugcccggcaaguguccugagagacaggcccaggacaccagcgugggcccugccaccccugcacggaccagcagcgaccccguggccggcaccccccagaucccccacacccugcccuucagaggcaccacuccaggcccgguguucacggagacaccuggaccacacccccagcggaaccagggcgacgguagacacggcacaccaugguacccauggacaccuccuaaccccaugaccgguccaccugcccugguguucaacaacugcagcgaggugcagaucggcaacuacaacagccugguggccccuccuaggaccaccgccagcagcagcgccaaguacgaucaggcacaguucggccggggcagagguuggcagcccuuccacaagggaggaaucaagaaggagaucgaggccauuaagaaggaacaggaagcuauaaagaagaagauugaagcuaucgagaaggaaauugaggcc

SEQ ID NO: 1487 - RNA, 585 nt, Artificial Sequence
  Synthetic: (Diablo.3; TH2003 without epitope tag) - nucleotide
auggccgcucugaagucauggcucucaagaagugugaccagcuucuucagguauaggcagugccugugcgugccggucguugcuaacuuuaaaaaacgcuguuucagcgagcugauucgcccauggcacaaaaccgugaccaucggguucggagucacacugugcgcugucccaaucgcacaagcuguguauacgcuuaccucacuuuacagacaguacacaucuuugcugggaaagaugaauucugaggaggaagacgagguguggcaaguuauuauuggcgccagagccgaaaugacaucgaagcaucaggaauaccugaaacuugagaccacauggaugacggcagucggacucuccgagauggcagccgaagcagccuaccagacaggugccgaccaggcuagcaucacagcucggaaccauauccaauugguaaagcugcaggucgaagagguccaccaacuaagccgaaaagccgaaaccaaacuggcugaagcccagauugaagaacugcggcaaaaaacccaggaagagggcgaggagcgagccgaaucugagcaagaagcuuaucugcgggaagau

SEQ ID NO: 1488 - RNA, 786 nt, Artificial Sequence
  Synthetic: (Myr(Lck)-IZ-L-msFADD; TH3002 without epitope tag) - nucleotide
augggcugcgugugcagcagcaaccccgaggacgacuggauggagaacggcggcaucaagaaggagauagaagccauuaagaaagagcaggaggccaucaagaagaagaucgaggccaucgagaaggagaucgaagccggcagcggcggcggcagcggcaguggcggcggcagcgaccccuuccuggugcugcugcacagcuuaagcggcagccugagcggcaacgaccugauggagcugaaguuccuguguagagagagagugagcaagagaaagcuggagagagugcagagcggccuggaccuguucaccgugcugcuggagcagaacgaccuggaaagaggccacaccggcuugcugagagaguugcuggccucacugagaagacacgaucugcugcagagacuggacgacuucgaggccggcaccgccaccgccgccccccccggagaagccgaccugcagguggccuucgacaucgugugcgacaacgugggcagagacuggaagagauuggccagagagcugaaggugagcgaggccaagauggacggcaucgaggagaaguaccccagaagccugagcgagagagugagagagagccugaagguguggaagaacgccgagaagaagaacgccagcguggcugggcuggugaaggcccugagaaccugcagacugaaccugguggccgaucugguggaggaggcccaggagagcgugagcaagagcgagaacaugagccccgugcugagagacagcaccgugaguagcagcgagaccccc

SEQ ID NO: 1489 - RNA, 501 nt, Artificial Sequence
  Synthetic: (Myr(Lck)-IZ-L-huFADD-DD; TH3003 without epitope tag) - nucleotide
augggcugcgugugcagcagcaaccccgaggacgacuggauggagaacggcggcaucaaaaaggagaucgaggccaucaagaaggagcaggaggccaucaagaagaagaucgaggccaucgagaaagagauagaggccggcagcggcggcggcagcggcagcggcggcggcagccccggcgaggaggaccugugcgccgccuucaacgugaucugcgacaacgugggcaaggacuggagaagacuggccagacagcugaaggugagcgacaccaagaucgacagcaucgaggacagauaccccagaaaccugaccgagagagugagagagagccugagaaucuggaagaacaccgagaaggagaacgccaccguggcccaccuggugggcgcccugagaagcugccagaugaaccugguggccgaccuggugcaggaggugcagcaggccagagaccugcagaacagaagcggcgccaugagccccaugagcuggaacagc

SEQ ID NO: 1490 - RNA, 504 nt, Artificial Sequence
  Synthetic: (Myr(Lck)-IZ-L-msFADD-DD; TH3004 without epitope tag) - nucleotide
augggcugcgugugcagcagcaaccccgaggacgacuggauggagaacggcggcaucaagaaagagaucgaggccaucaaaaaggagcaggaggccaucaagaagaagaucgaggccaucgagaaggagaucgaggccggcucuggcggcggcagcggcagcggcggcggcagcccccccggcgaggccgacuuacagguggccuucgacaucgugugcgacaacgugggcagagacuggaagagacuggccagagagcugaaggugagcgaggccaagauggacggcaucgaggagaaguaccccagaagccugagcgagagagugagagagagccugaagguguggaagaacgccgagaagaagaacgccagcguggccggccuggugaaggcccugagaaccugcagacugaaccugguggccgaccugguggaggaggcccaggagagcgugagcaagagcgagaacaugagccccgugcugagagacagcaccgugagc

SEQ ID NO: 1491 - RNA, 795 nt, Artificial Sequence
  Synthetic: (Myr(MMSV)-IZ-L-huFADD; TH3005 without epitope tag) - nucleotide
augggccagaccgugaccaccccccugagccucacccuggaucacuggggcggcaucaagaaagagaucgaggccaucaagaaggagcaggaggccaucaagaagaagaucgaagccaucgagaaggagaucgaggccggcagcggcggcggcagcggcagcggcggcggcagcgaccccuuccuggugcugcugcacagcguguccagcagccugagcagcagcgagcugaccgagcugaaguuccugugccugggcagagugggcaaaagaaagcuggagagagugcagagcggccuggaccucuucagcaugcugcuggagcagaacgacuuggagcccggccacaccgagcugcugagagagcugcuggccagccugcggagacacgaccugcugagaagaguggaugacuucgaggccggcgccgccgccggcgccgcccccggcgaggaggaccugugcgccgccuucaacgugaucugcgacaacgugggcaaggauuggagaagauuagccagacagcugaaggugagugacaccaagauugacagcaucgaggacagauaccccagaaaccugaccgagagagucagagagagccugagaaucuggaagaauaccgagaaggagaacgccaccguggcccaccuggugggcgcccugagaagcugccagaugaaccugguggccgaccuggugcaggaggugcagcaggccagagaccugcagaacagaagcggcgccaugagccccaugagcuggaacagcgacgccagcaccagcgaggccagc

SEQ ID NO: 1492 - RNA, 786 nt, Artificial Sequence
  Synthetic: (Myr(MMSV)-IZ-L-msFADD; TH3006 without epitope tag) - nucleotide
augggccagacagugaccaccccccugucccugaccuuggaccacuggggcggcaucaagaaggagaucgaggccaucaagaaggagcaggaggccaucaaaaagaagaucgaagccauugagaaggagaucgaggccggaagcgggggcggcagcggcagcggcggaggaagcgaccccuuccuggugcugcugcauagccugucaggcagccugagcggcaacgaucugauggagcugaaguuccugugccgcgagagagugagcaagagaaagcuggagagaguacagagcggccuggaccuguucaccgugcugcuggagcagaaugaccuggagagaggccacaccggcuugcugagagaguugcuggccagccugagaaggcacgaccugcugcagagacuggacgacuucgaggccggcaccgccaccgccgccccccccggcgaagcggaccugcagguggccuucgacaucgugugcgacaacgugggcagagacuggaagagacuggccagagaacugaaggugagcgaggccaaaauggacggcaucgaggagaaguaccccagaagccugagcgagagagugagagagagccugaagguguggaagaacgccgagaagaagaacgccagcguggccggccuggugaaggcccugagaacaugcagacugaaccugguggccgaucuuguggaggaggcccaggagagcgugagcaagagcgaaaacaugagccccgugcugagagacagcaccgugagcagcagcgagaccccc

SEQ ID NO: 1493 - RNA, 501 nt, Artificial Sequence
  Synthetic: (Myr(MMSV)-IZ-L-huFADD-DD; TH3007 without epitope tag) - nucleotide
augggccagaccgugaccaccccccugagccugacccuggaccacuggggcggcaucaagaaggagaucgaggccaucaagaaggagcaggaggccaucaagaagaagauugaggcuaucgagaaggagaucgaggccggcagcggcggcggcagcggcagcggcggcggcagccccggcgaggaggaccugugcgccgccuucaacgugaucugcgacaacgugggcaaggacuggagaagacuggccagacagcugaaggugagcgacaccaagaucgacagcaucgaggacagauaccccagaaaccugaccgagagagugagagagagccugagaaucuggaagaacaccgagaaggagaacgccaccguggcccaccuggugggcgcccugagaagcugccagaugaaccugguggccgaccuggugcaggaggugcagcaggccagagaccugcagaacagaagcggcgccaugagccccaugagcuggaacagc

1.-130. (canceled)

131. A method of treating cancer by enhancing an immune response to a tumor antigen in a subject, comprising administering to the subject a messenger RNA (mRNA) encoding a human Stimulator of Interferon Genes (STING) polypeptide, and an mRNA encoding the tumor antigen, thereby treating cancer by enhancing an immune response to the tumor antigen in the subject.

132. The method of claim 131, wherein the human STING polypeptide is human STING isoform 1.

133. The method of claim 131, wherein the human STING polypeptide is human STING isoform 1 comprising one or more mutations selected from the group consisting of V147L, N154S, V155M, R284M, R284K, R284T, E315Q, R375A, and combinations thereof.

134. The method of claim 133, wherein human STING polypeptide comprises an amino acid sequence selected from the group consisting of SEQ ID NOs: 1-10.

135. The method of claim 133, wherein the human STING polypeptide is human STING isoform 1 comprising a V155M mutation.

136. The method of claim 135, wherein the human STING polypeptide comprises an amino acid sequence as set forth in SEQ ID NO: 1.

137. The method of claim 131, wherein the tumor antigen is one or more personalized cancer antigens.

138. The method of claim 131, wherein the mRNA encoding a human STING polypeptide comprises an open reading frame comprising a nucleotide sequence as set forth in SEQ ID NO: 1320 or a nucleotide sequence at least 80% identical to SEQ ID NO: 1320.

139. The method of claim 131, wherein the mRNA encoding a human STING polypeptide comprises a nucleotide sequence as set forth in SEQ ID NO: 1319 or a nucleotide sequence at least 80% identical to SEQ ID NO: 1319.

140. The method of claim 138, wherein the mRNA encoding a human STING polypeptide comprises a 3′UTR, and wherein the 3′UTR comprises a microRNA binding site.

141. The method of claim 140, wherein the microRNA binding site is a miR-122 binding site.

142. The method of claim 131, wherein the mRNA encoding a human STING polypeptide and the mRNA encoding the tumor antigen are chemically modified.

143. The method of claim 142, wherein the mRNA encoding a human STING polypeptide and the mRNA encoding the tumor antigen comprises 1-methyl-pseudouridine (m¹ψ), 5-methoxy-uridine (mo⁵U), 5-methyl-cytidine (m⁵C), pseudouridine (ψ), α-thio-guanosine, or α-thio-adenosine, or a combination thereof.

144. The method of claim 131, wherein the mRNA encoding a human STING polypeptide and the mRNA encoding the tumor antigen are fully modified with 1-methyl-pseudouridine (m¹ψ).

145. The method of claim 131, wherein the mRNA encoding a human STING polypeptide and the mRNA encoding the tumor antigen are formulated in the same composition or different compositions.

146. The method of claim 145, wherein the mRNA encoding a human STING polypeptide and the mRNA encoding the tumor antigen are formulated in the same lipid nanoparticle.

147. The method of claim 131, wherein the mRNA encoding a human STING polypeptide and the mRNA encoding the tumor antigen are administered simultaneously or sequentially.

148. The method of claim 131, wherein the enhanced immune response is a T cell response, and wherein the T cell response is an antigen-specific CD8+ T cell response, a CD4+ T cell response, or both.

149. A messenger RNA (mRNA) encoding a human Stimulator of Interferon Genes (STING) polypeptide.

150. A composition comprising a messenger RNA (mRNA) encoding a human Stimulator of Interferon Genes (STING) polypeptide, and an mRNA encoding an antigen of interest.
